United States Patent Application Publication US 2025/0235397 A1 - sequence listing, part 17

SEQ ID NO: 18 - DNA, 4010937 bp, Bacillus subtilis (residues 2,005,470-4,010,937 of 4,010,937)
  source 1..4010937: mol_type = genomic DNA
atgcgtccaaacgtgccgtctgcaattccatttccatcaagatcaagctcatattgctgatcgattttgccatgcaaatcattcatgctgagaattctaagcggcacatgttcttgaggtgccgtttgcctttttttatatcccgcgctctccgcttcacttgctgaagcgaagaaaattctgttttccacagctaccttcttccagtcagctggctgcacatatgttttattcgacgagtcccccacatatcttgttaagcctttcccttgctctctggctctgaattcaaacggcatttccatgaggggatcgttttcattccaaattcctttttgatctttttttgcagcggctactgcggcctgaaattgctgataatcctcttcattgtcaaccggccaaataaaatacgtcggagcatagccattttttacaagctctaagtttacgttggaacctgattcggttatgacttgtccaagcaatctgccatagctgtccttggcttcactcccgaccttgacagtaattttatcacccggggacagaaccgtttttagatagtcagatgcttttttgccaaatcttaattgattttcatctgcgtcattttttggtgtgtgatatgtttcgggtgtatctacatttacaaaccggatttttgtcgttccaagcaccggagatttgagatgaatggtatcgccgtcaactacccggtcaacaatcccttcatattctccctccgcagacggaggtgcaggctgctcttcaagcagcttcaggtcagccgattttcgcggaagcagctgaaaggtttggtatctgcttaacacaccggtaaattcataccatttgccctcatcaagctcgtctatcacccctgtttcattcataacccggagcgtcattgcatgatggtcgtcatcaatcattgttacattgtaaccgccgccggcaggagaacttggaattgaggaaacaaaagcggttagtttcacaaggcgtccttcatactgatcacctaggctgccgttaataagttcattgattgttaagtgtttgggggcggggagggattgatttgactggttgattttgatgcctgatgagcttggaacgatttctttcagcccctggtaagacatgattttccctgtcaccgtgacatccataccctcttttaattcgggaaattgttcaggggatggcgaataaatgttaatgcctccggtttcatcttgcaaaaaggtcgacagcttcccgcctccgattgcgttttgatcagctgtaatgatcccttttatcgttacttcttcattcagccttccccgtgcttcatttatggtcacttgctgttcagccggcggagttttcgtgtcatcggttacgttcatcgactgaacgtttttaagtcctgtcgtgttaaagtaattttcaagctttccttgaaccgttatctttttcccaagaagaagcggattggtttgcagcccaaattggcttctgaaggcggaggggatttgcacaggaaggatgtgttcgggcgatgtctcgtttttacggtctgccagcgcaacattataatcatttgaaaaagggcttgtcagcttataatgctgtggggaaacagcctggccgactgcatatccttcgacaagcgcctgtccttctttttgctgtattgccttctcaatcgatataggctgttgcggttcagctgcctttacagcttcgaacgtgtacattacatttaagaacatcaatgccgtgatcaacacaatatgcagaatacgcctcatcatatttcctcccttatacacataatgacaacgattttgtctgcttatcatttcgacagacagcatataaatcctttcaggcttctgcataatacacggcagactgacacaaaatacagctgatctgaaaaaaaaggaggaattcggtttggatcagttcaatcagcagcaacaatcccaaatgaacaaaggtattcctggcaaaccgcataaaaaccacggcggacatgaaatgtttgatatgcatgaggtgctttccggaacacttactgtgctagatcagtttatgatgctgagacaattctgtaaggatcaagaattactaaacatccttgatcgtcaacatcaattcattacatctcaatacaatataactgcagaatgcttcaaaacaggaagcgaaccttcacaaaaaacagcaacttatatgatgaaggaggacaaccagactgtttacggcatgcagccgtcacagcctaaaaaacctgttcaatccatgaatgatattgatgacagcatcatcagccgacaaatgctttgcgcgattaaagcacaagcttctatgctgacgatggcttctctggaaatgacaaatccggccgtaagacgcgtactgtctgcgcaaattcaggagtatgttgaaatggcatttgaaattttcctataccaaaacaaacacggctattaccaggttcctcagcttgatgcgcaggatatggaacagctgagaaattcattcgcccctgcccaaggacaaatgcctccgacacaaggcggaatgggtcagcaaggacttcactaataacaaaggcattggatagatactatccaatgccgcactgttttttttcaaattttttcttgaaatctttttcaaattgatcaagactttcctttgttgctgatttaaaccctttttcaaagtcccctttttttgctgtttccttaatcatttctgaaataatgtctttcccatatttgtccgtcagctcatcgatcatataaaagctttgcaaatagacatcagtgtcatattcggctctggcttcctgccagtctcgatcagtctgcaaacggtcaaagggcacgacagaaaacgtgatcggatctatgagcaattcatagttcgcaatccactcgcttaacccttcatgaaaccataacggaaactcatcgggatccgtctcaagctccttcaatttctggtgaaacgcatggtgcgagtattcatgaatcaacaatctctggtacaaataaaccgctacctcgtccccttctaacagtttctttttctcttcaggcaacaatccgatcagctgctcccgttcagaataaaaaccaactacatccaataaaccggagtaagcctccatctgtttttcattaggaaaaaaaataatgtcaataggcttttgattcgaatatccaatcataatctgattaatactgaccgcatattcaagcgtttctttcgtcaatggcagtaaggacttttccttagaagtgtaataaatatcggcctgtttgaatgactctttcttcatgtgcttcgtcacttgttcttttgttattccagatgcctgacctggaaaagacaggatatacatcgcgcttgatacgatggctgagctcacagccagcatcacaaggactccgcacaggaatagagcggatgccgcacgctttcctatgccatcccgcaaacgtctccctccctgagccggtccgtcttgtacctttttatttttactctatgcagcctgagttcgcagtgtgtcattaacgcaaagaaaaagccgcacaaattgtgcggctttttttatttattcagcgttagggaatacgcgctgtacagtttgtgtaaattcatcaaataatccggcgattgggtcaccattttgaatacgttttccatatccttgcatacgctctacaaaatcagggttagctgaaacgtaaacattatcaatgtttttgtcagtagatcttacctttttggctatttttttcttcaaattgttttctactgcacctttatttccattggttaaaacgactgcaacgtaggcttgatttccagccacaatgatatcggcatgctttacttcttttaggtctgttactttatcagctgcttcatcagcaacctcaagttttcggtcgtttttattatcgtcatttacacgattgttattgacattatcattaacattattgtcaacgttatcccgattgtttacattccgcatatcgtcattggccggatttcgataatttacgtttcttacatcattattatcacgtctgccctcaccttggtcggctacaccgcagccagtcataagcaaagggataagaagcatagacgcaaggacttgtttttttccaaacatgtgaattcctcctttatcactttacttataggtttttctaactgggtttaattatgcatgcaaatctggaggaaatgctttcccgggaaatataacggttaatttgtctaacgagggggaaaatatgaatacactgcaaaggagggatcatgttgttcaaccagcgaagaggaatcagccccgcagcattgatcataggatcaactatgcttattgctgcattatcacctcagatccgccaaagaatcagcgggtttatcacaggacaaatgaacagacgaaattcagaaaataacacgtttgatgcttctaatgtaggaaacatggtcaaacaagcatttagcagaagcagcggtgataaccaagaccgttcgcaacatcaaagccagcggcaaaatggccgtcagcaccagcacgcaggacagcagcaaccacagcatcagcatacacagtctcaaactaggcaaactgagacacccgcgaaaaaaagacagccgcattatgctgaacccattcattttgaacaaagcgcaatgaatgtcatggacgacaacacgatgatggaaatgctggaggacttagaacccggccgttaaaaaaacgtgtaatcctgttggatctgcgtaatgatccaaatagttaattatgttggtttttcaggcgttttttgcttttaattttcttgttttttatattttttcgtctgttttggagtacaattggtgagcataaaaaaagccttctttcgttcaatgttgaacgattgaagggctttttcatttatgctgccactctatccgaagcaatctttattaattcattattagttcccacatcaaaagttgaaaaggacagaacactagttaacaccgctactgccaatatgacccgactgagtttcattaataatctctccttttttaattttgtttcttgcttcaacactcatcatataatattcacttgagcgttgaaaatcctgtttccgatgaaaaaattgggccacttcaacagcatagttctctaaatctgcatacattttcattgaatcaaaatatgcaaaagcctcactaatcaattcatattcaccatttgaaaaataaagtccttctaatattttaaatttagcattatattcagcatcatttgttttatttacaaactcatgtcctttttgaaaatagtcaccagctgattctttgtcaccttgcttgatctttacatgtgttaaaataaaaagagttttcgcaacaaaactgtgatcgctaacctctaacaaatctaacgccttttttagatgacttgatgcacttttgtagtcttttaactcatcaaagcaaatacctatgttgatgtgtgccatcccaattaaataatcaattttaatttcttcagctatttttaacgcttccataaatgtatccaatgccttttcatattctagggagtcaataaagtttccacctaatacaaattgacatcttaatctctgtataaagtaatcatcatacctttgatatatttcaagagctctataggcatagttaagcgaaaagtatgtttgcttcatatagtaataaacatatgatactttaaaaaagaattctgctttttcaatctcatcatctacttcacttaatttagcttctgcttttctatatgaagttattgccgcagttagtttttttcttctgaattcatacatccccataaagaaatgaaaataatattccaacattccagtaacattgccctggtcctccaactttttcatagccagatatgaacttttcaattcttctgtcttttctgaattcatgtaattgaccaataactcgtggcggaattcaagtaattgataatatagtaaagcatctttactttcttccattttttttagatcttcttcaacttctttttttatttgtttagctttctcaagagcatcattttttatatgagtgtaccattcgtttaatcttttggtaactacatcatatggaattttatctttatctaaaacacctcgcaagaaaattcccccatccttacaattgtgagaatatttacattaattgtattgtgtcagaacaccctttattttacaaagatgaattgtaaaaaggtacaatatatctaaacctttgcggtttttttgcggtatgagcaattcctttgcgacttgacagaaagatttgtgacttgtgactttactgataccataaaatgaagatcttgcatcttgcacaattccaatcctgacatgcatttataagagcaacaacatatgttttgacaacttcccaaaaaagaaagagagcgactgccaactatttagatacttatggaagttatggaagcatatcaaaaagccaaggattataaacccttggcgttccttaaatttaaatgttattttcatctaagaaaactccatccctactctctatacgcttcttcatacctttgggtattaatgaataaatttcattaattttatttttttcagttatcattttttcaacaacaaaatttaataaattaaacaatgataaagcaacttcaaaaccgtcttcgccttctaaatcaattttacctgggtgtactgcattatttccgataactctcaaactgtccaatgccttttgaatactttccggtagccctttactaacaagttcgccaatcattttgtctattgtatctttttttgccccgagttctggtaataatttttccactgctaagcgaaggattgctacagaagctctatgagagaccataacgatactacttgcttcctcgtaaagtttctttatttcttctggcatatctgaatggggagaaggtacaggtgatgtttggggatacactaactgtcctttcacccaaaaagaaggtttttcacaactagcacacatactcatagcaaaaacattattactataaaatccatttacaatatggttaaagtgtttctcttctccggttacttctcttaagtatcgttcaagctgtagctgcccgtagtcaccctctacatattcataccagtcttgggcagaaaacgctgcacaagatggacaattaaaccttggtttaccatattcagaaggaacgtatttttgttccatttgatcaatcacactccacggtaatattttacatccgtgtaaattatatcatgttctacatgtttatctatgatttttagaatgatgaataaaacaacttactttaagtaactgcttgaatatgaaatggggaataaatacaagttaaacaccccaaaaaaaacatcaagagcattaaacccttgatgttactgttcctatgattagcccgagagggctttaacctgacaaggtttgctctcaactacatagtaaatctatataaatgaaagcttacttcaccacattttcttccttcattttcatttctatatcataggaattaataaagctattaaaataactgcaattactggaagataaaaaggtaacagcgtctttgatattgtaacattccaccaattgaactcatttttaatattatcactaagtttcatagagaaattaacttcatctagttgtaagtctattacatcttcatataacttcctaaacaacttttcttgataaaggtaaaagccatctaacccccaaaaaaataaaactggtattaaagctactataataaacttagaattcatctctttaaaattagcaaaagcaagcaaccctacaacaatggtcacagtccacccctttattaaaaacgaattggaggccatacgagttattatattttgaatcatttctaaataccttattttcttttcttcatccatctatcatccctccaataaactttattcctcacattcaagaattttaatcattttttattaaatttttcattaaattcttcatataatatagattatccaatgcattatccattgggtaacgtttaaaattatctaaccatgactctaaatctcttttaactagattatctaagtgttcagttggagcatcataatatacagtcatacttttctctgcaaaaaattttttttcaggtctgtcaggttttgattttctaattaaatcagtcatcgctaattctaaaaatatccatggtgagctcgtttgttgaactacattcttgctttcaatagagtttggagtattcaaaaacattacgcattctgttttatcaatcatcttaatcaaggctgttgaaagcatcatatgtacatgacttgtagagtgatttctaagttcataattatagaagccatcgtcctgcctacaatacttattatctaacttctttaaaagatcatcagcataaccccatacacaagaatctataaatgttttcagaccaaatgattgttttaaccaacctgctaaagcaatagccttatctaaatcagcatgagaatgagataaaaaaatatgagcatctatttccggaaaccaatttccttgtaattgagttccggaaatacttccatccccctcttcatttatgtatttgtctagttcttcttcaacattttttttgaaattttctaaataactctttccactactgtaaaattccacaaaatcaacgtcatttaagctcagattataacctttatacatccttcattcccctttagtctctttgttattaataattttaaataacacttttaaacatttattatataatttaattctttcctaagaaggttttgaaacctagagtcttcgttaagaaaacaggtttcatttgtggtctccacattcaccactaaaagctgcgcggataataacattaattgtattatgccagaatctccttaattttacaaagttgaattactaaaggattacattatgtctacttttttttcgtttttgcggttataccaatacttttgcaacttgactaagaggagcaaacccatggtttactcctctaacttagtttctttacctcttgcttcttcatagtctggtgttttcttcgataagccaagacgatcattttcgccagttcttgacatgccttctagccttgtatattcatcaccttgcttttcgtagtatgaaaacgaagataattcatcattagaatctttagacgtatagaaagcaacttgaatatattttccaccatcaaatactttaaccaaggcattatctcttgttatttcgtaatttggattatttacttctctttcttttttatattggttaattacatcattaatcgcatcatcatacttgttgccaccacatgcagttaaaacaaacatcatcatcaaactaaggaaaataaaaaggtttttcataataaatattacctcctttttcaatatttggtgtaaacaaacaatctgatcttttccaccttttatccatttcccttaacctgcacattatcgactaaccaaccacccttttctttcttcatagtcgtttgtacaattaacacttgattcgtagtgactgaatttgcagttgtggcgacttcaacaatgtttaagaataattcatgagattcatctaacggctttgaataactctctaaggaaattaaatcactttgcacactgactgtgtgcttttgatctgagcgagaagggaatgcatagtcaaacccttttccggttgtatacttcttaactgtttcatatcgcttatctatgtcggagtaattaaaaaacgcttcaaaaaatgccttattttccgaagcgctgcttgttgattctacatgattcaattgcttgattttttctgtcaaaacttcatttttatcctttaatttttcaatcttatacgtttgctgtccattcgtaaaaaatccggtcagcaatatcaataataaacaagctgaagcccatgcaatatgtgttttcatgttttcactcctagttatttaatgcgtccaaaagatacaaggtgctctctccagtaacctgatttcagatcagaatattcaattccactgtcatttgaattaaacattctgccatcgcctacatagataccgacgtgagtaatggcttttccttcgtatgtgccgccaaagaacactaagtcacccgcagtcgcttctttttcacttattttctttgttgctccatgttgttcttgtgctgttcttggaagagtgattccagctttcgcaaaagaccattgaacaaggcccgaacaatcgaatccagttttcggatttgaaccgccccaggcatacggttgcccttcatactttaaagcttctttcatgaccgtttcatagaaatccatagaaccgttcacaggctttacatttttatcagagcctttcacatacctcatgacatggtcaacataacttgggtcaccgtagcttttccagcccattttaaaggcttgcagccggctaaaatcgagtgctaatttcttagtgtatttcccgccattctttttcacatagtctataaatccagaaccgaagttgtatgcctgtaaggttaaacgaacatcaccgccagcctgtttaaaaaccttcttaaaatgtttaatgccaacttcaatcgaacgttctgggtcagttatggagtttggaggtaaaccgatactctcggaactttgcataatatctaaagaacgcccaccactttcctgcatggtgagcgccattataatattcacttggtcaaaaacgccttcctgacgggcgtatttctcaaatacagccctaaatcgttcgacctccggtgcaatgccaactgtttcatattcgccatccccgccgcctatgaaatcgtctcccacgtgattttctcttgaaatggtcataatcactgcgatacataaaacaaaaaagaagataaaaggagccgagaacaccacaggaagaactacctttttacttatcattttgtcctttcatcccttctcagtcgatcttctacttttgatgaagagcgtcttgcaatttcatttaacgagacttgctcaaatgtattaacgctttgttcagtccgtttaacactaggtgctgaaggctgtttttctcttgatacagtcttactttcagcaggggcaacagtctgtttttcctcaacacgaataccatctgaatgaacttttgcgggttcagatggtctgattttacgtgcgttattggcaataggttgattttctacttttgtagattgagagctttcaaaaccgagctccgggtcagggtgattcgtcataactttttggtctgatcttttgatctctgctgatctctcttgtgctacaggctcactctttgaaacagaatcatctttctgcacttcaaaatcttgttgctgatctgtttcaggattttgcttttgttcttcataaacatactctttctgatcagtgcgttctgtatctttatcattctcttgtaagacaggcgctcgattagaagcaatttcttcttcatgttgtaatgatgcaacgtcagtttgttgctggttattgggctgtttaagaagctgttccacatattctttttgatctgttcgtgctgattcatcttttttatcctgcaagataggtgctcgtttggataaatcctcatttccttcattcaaagcatctttcagcataggagagtttatcccgtcttttctcaatctgtctaaatgggattgctgtttattttcttttgcatttgcaaagacttctttttgtttttgcttttcttgttctttcgatagagtttgaggatttcgttttaagcttcgactgttatgactagctattccgtttgctgtttctttttgcggggttcttgaaatggcatgagtattatcatagctcatagcagccccactcggagaattaccgccggcacttggagcaccagttacgccatcagcattcgaaccgtcttttcttcccccaaaatgctttgtaaagtcagtaaatacgccgcctccgttaccccatactccacctattttctttgcttgttcccaagcaggctgaacaatgttttgtctcatgttttccatcatattattatcaactgaaactacttttccagcagtcacaaacttgataatagcatccctcttgtgaaaaccaatccacaaaattgaggcaaggacagcaacatttaaaagatacattccaaaaccatttggcggtattaacttgtcaacgataaaacaagtcacgtacacaaacagaacgataacccctaacattgctttcagtaggtaaacactccctaagcgtccaagcgtaacaaatcccgaataagctaattgaggaacatacgctaagatgaaagcaaatggcacaaaaaagacaatgactaaagcaacaacttgaagcaagaaattaaagaacgctagtgccaaaaacggtatcccgatcacaattgaagcgaccacagcaataaaagactctccaagttgagcaaagacattcccagtggtcatggactcattttcatatttgcgtatttccgtatctttaatatggtctttttttgctttctctccatcctcagaaagcttatacgaaagaagtttatcgaccctcgataatttacttttcgaatcgcctttttcattaatttttgcttcactcgtttctccgaaattcacgattagaaaaggtttcattaaagccatgtcaaagtaaaggttacgcatgaccgcaactgtgccttccatttcttttcctttttcaatcccagaactgtctgcaaaattgccttcatcacgcacaataccaaccaatccatttcccgcagttaaaagctttccttgcgcttctacagacaaggcattcaacgctttcatgtaataaccagcgtttgacatccaaagcccgccgatcaccatgacacaaataaatagaatactccgtcgcattgcttcttttatgctacctcttacacagaacaggtagacaacataggcacatgtgaaaataaataaagcttcaccgaaattctttttcagtgttttataaactgttttagagacatttgtaatagaatttgcaaactcgtcaattggttgcaagttatacaaaatatccattcccgcatcaaccacacggacaatgtttcctgcaaaagaaaaagtgacgtttgtcagtccaacaaacgcccccttgattaaatcgtcagatgcttcattattcgcttgataacgtgagataggaaaccttttcaccttcaattccacgccgccagctttttcgacttttggctgtgtcgttgtatctccatcagccgaaataacagtgacagctgaagcaacagttagaaacaacaacacgatagccgacacaattagaattctttttttcttcatcacaaccacctcctaatctaaccgagttaataaataaaattggtatttggctttctctaagtctctttgcgttagcagcacgttttcgggatatcgttcatacagagagaaacagattgctttttgatatttcatatgcctaaaagtctttcggttttgttcaatcttgatgcctaataatttttgcagaaacagtgccgttgatttatgcccgataaaacttttgtatcgcccgtcataatgattcagccattgtttcacttcgtccaatgtgattttttcagctttataaaagccaggacttgtgacaacaagagagtttaagaaagctatttccatgtacgattcaaccccttttacaaatatttttcttccgcatatgcaacagcttttttctcgactgtttttaaagcgccttgccattcttcgaataggcattcaattgaaattttggaggtacggccatagtaatctttaaataagcattgaccttgaaacatggattccatcatttttttgttttcttttgtgacctccatgttcatccatttcaacacttcttcacgctcattcggctcatcaaaggcaaaggcaacaccgaagtttccagaatcctcttcttttaaagcgtcttttgtggattgggaaatgaagtattccgcattgttgtatgagcgaccaatccggcgcatttgtctttctactttttttccttgttgtgacgtggtaaatatccaagcttcatctataaattcaacagtctgttcatcttgattcatgccgaatagttcgcaaaacttacctagtgcaaacatgacggcactagattttaattgtgatatcgtgtagttttcgagtcgctcagcatgatccggcaaatccatattttcaacttctaaaatggtaattcgcttttctagtgacaatgcaggatttgaaccatcatgaatacaaagtttcaaaatggaatctgacacgacctcatttaaatagtcaccagctttttgtacagcttcttcgggatggctctgcatcttccgaataatatcaagtgagccgacctgttcacctttttgtttcgcatcaatcacttctgacgtagcacgaaggaaagctgtgtttatgtcgtccttccctttaaagtcatatacttgttcaaaaatgacttgaactagctcttttgctttcataggagggaggaaggagatagggtcaagcgctccccagttgtgcgtgttttcatgatctagcgtgatatagttgtatttctctaaatgtgcaatatataagggaaagttctctctaatgtactcatcattcaagactctttgaatccactttctcatttcctttttagggtctatatacagagatttgatgtttaacatgctgatatagttaaagatcaatttcgctagatatgacttgccgtttcctgtgtctcctgtgattaagcagtgaggagaacgtgtctttgaaccttttaactgctgattcgctaagaaagggtggaataagacaaaatcacggctggacataatggcactttctaagtcggtgtgctcttggaaacgatcaacccaaccgagaaagaacccgattttcgaaccaatatcagagttaacagcaaacagactttctgccacaccgtcttgcgttgttttttgaatccagttcttatcagttatgtctaacttttcaccaggaagcattttataaaaaaggttcagttgatcagccaccggaagccgacaagtaatgccagcgccttttaaatgccttttgacaatcgttgcttttcccacacactctttttttgtctttccatgaacgactatcaccgacagccagttcatcacatgcacatcttctttctttatttcatcttgtaaatgccttatcattgtggcacttgtgacagtggaaacatcacttcgatcgcctgtgctttgttgttctttttgttcttctttcaattgctgtcttttgaggttgagggcaggcttggtaatggactttgattccgtttgaattttcatctgaacttcaacagggaagggaagagactgcgcttcataaaacaaatcactttccgacatattgtgaagaaattcgtcaatcacgacaaaagctgaatagccttcatcttggtcactatgcagatgtaaaactgatgggtcagtggggtctatgatcgtgtttgtaatagagcgaacatcctttatctcactttcttcattcgtttggtgctttaacccacgtataaagtgataacggttaatgtatgtcatttctgtttctgaaagccgttctccgcgaacagaagccatgatattcgctagtgtttcttcgacttcctcatatttttcaaaaaaagaggtggaaacattttgttcccacccgagcattttcacgactgtatcagtcgctgtattgaaaaaagatagtatattgtctttaagttcgacactaatatttacaagactgcttttcagttttacacctaatatgaagtcatactttgtcagccttcctaatcgctgttctaacagccttaccgtttcttcattgtagtaacgtgccacatccgttgcatctgccgcaatatctgtttctaaatccttaaatcgtttttctaattcatactcacttggatacatcatcaagtgaaaatcctcataagatgtaatttcttcaaaaagatgctgccacttctttttatacgattcaactttttctttattttgcataggaatcgaattgctttttattcggtagtacgcccacacgtcgcccgttcttgttaacagcaaattcttgtatattgccttcataggcgtttttagtctcatccgaataatccaccaccttcacaagttttcgaaactcaatttgtttttcattacttaaatcaacccttcggtcattgcaaaacttcttttgtggaagcttgatgaagaagtaatactttgcaaaatcaatgaagtataaatagatgtttttgccttccggctttattttcgtaacaagcattgtgaaaaaaatcggtattccaaaaatcacgatgacgaaactgttatcaaaagcgtgaggaaaaatcatcctcacgccgtaccaaaatccaaagcagagaccaacaaaaatgaaatagttaatagccggtattaactcaactgcaaagggtaacgaataattttcggttaattgctgaatctttttcggctctctcattgccttccggtagttgaacaccagacgccccattcaaatgcccccttacagtttttccattagcgcattgatccagccggagaattctggccagtgcttaataatccatgtaaccgcactaccaatacagcaaacaaagataataccgcccatttttaatctcatcagattctttgcagctatgaacatgaccacgatcgtaatgaattggataacaacatctgatgcccaaccttttacccctccaagtgttggaaggtctgcgccaagaataaagaaattcatgaaatccatatttaaacctcctattgatgtttaagtttgtttacataaaactgaccgctgttttccgtaatctctagactgaatttttcatttaccggaatgtcattttctttttccttaaatcggacagcacaaaaaacctcgaaaccttttttcgtctcgaagattttcactgactgcacttccccaaataacaagtttccttccaatgcttccggctttttcatcatataaaccatttcttctttcttttcagaagcgtatttctcaaagaaattttgaagaaatgattcgatagattcttttttctcgcctgcatattcgtctctagtttcttcttttcccttaaaagcaatatcgcctttcagatcataaatctgtgtaaagtaagggacagcagataccgcaaaggaatcatctttatttgtgactggaatattcagcaacatttgtttctcagatttttcgtttgttttaaccttttctttcaccttctttttcttctttccgtctttaacttctttttcaacttccttttctacaggatatagattttcatatgtgaccttatattgaaaaaggctgtttttatcaccttctttcacgttatataagctgtaatcttttaactctcgatcaccttttaagccatccacattaaaacgatcttcatcctcaaaatggttatcttcctgtttcaccatgtagctttcaaggctctgcatgcgtttttcaatagattcttgatcgttcttcacattcacatattcattgatgaaccctgacagaaagttttcagcagcagtcaccgaaattttttgtttatcttcatttgttggcttattcgcttcgtctttcatgtcattaagttgggatcgagtattaattgacagaagcacggcaagcagacatataaacagcaagccccctacacaagaccataatgtgacggctatcagctttgacctgtcacgaggaactttctgtttatctttttccggtctttcaattcgtttcagtttttgaaaagcagaccgaaaaaaggactcttcttttttatccgagccaatttctttatggagcaattcgattcactctcctttcatatatttctaagcactttcctcctggttaactttcatgtttcttgtcattttcaaaatggctctcgccattttttcatagttcggttcgtttaactccgtcacgatcacttccactggcttacctttaatttcaacgacctcaacactctgtttcatgaaagatctcgctttcttcaaacctgttttgttttttcaaggaataataaaaaggatgctacataatgtaacaccctttatatgctttgattctccatatagacttttgaatagggatattccacattaatacaaagctactgaatcttttgtctcacacaaaagatccttcttttaataacctctggttaaaattaaaaggaggtgataatataatcacctcctcaaacacttatagctataaatgttttgatcttacacacaaatactaagatttcaactcgctaaatatctgcatttgtaaatttcataatcaatgatttacctctctattatcaatactttagttttaaatatcatctatccactaattttaaatttactctaaataatcttatcaaaatatctaagctatactaagtattttatctagtcattattaaaaactatagattctattcttttttcttgcatattttattctttggttttatttctatctctaaatctaaaccatctaatattttaagtaaggtatcaatattataatttttagcactagttactctaactatttgaggatgttttaaaccaatattctgagctaatttacgtatagacaactccttcttatctaaaccttcttttattttatgagtaatctttaatttgggtatcgagagtttgttgtaatcctcaggaatatccatgatgtctgaaatactacggacctcaatattctcgatatctttagacatatttattattttccctccttttcttatttctatttcaaataaagctatctaataatttcataatgtgggtatcagacttgctggagagaaggatgatttaccatccttctcgtttagcaattctttctgcagcatctaaatctcttttattgagtttttgggtggtttttctaatcatatttaacaaaccatacttcgcaggtctttcatttcgagaaatttttttgaagaaaattctccattctgtttttgatctgtctttaaatttcatttcccaaatgtcttttctgtgtgtcttcttgactcgctttccgataaaatcgtcattagttccataagaagataacaaattaaatgattcaaggatttcttttttaacttctgctgataacgatttgtttcccaacccattaactgtttcttttgtaagtaagagatttggatactgaggaatatgtattttagataccatatccttcataccctttcatatgaaatttttgtatgctctgttcctcctttataggaatgatagaatggtaacataattgttacctgtattcaagttttaagacttgcaacaaaaaatctttagatttatagaaacctttcaaaagatctcatcccatccctaatctcgcaagtattaacaacctgttatgctccactctccttcttttcaatttgtttcattctttctaagaaagataaaaaggatgctacacgatgtaacacccttcttatgctttgattctccatataaacttttaagctagtcatccgaccgtccggcaaataccttgtcttgtagaatgtgtaacgatattcagcaaatccttttactctttctccttcgacaatcaacatgcaatctctgcttaaacttctcacaaaaactaaagaggggatacccacattaaaacccaagcttctgaatcgtttgtctacagcagacatcgcacattttcaccccttattaataataagcttaattcttcaaacttcatgtttctaacactgagagaattttattttttcacaatctatattttttgaatactcgtacttttaatgataaaatttaactaatttcattaaaaaggaagtgtaagtatgggtattgagtatgcatatagtttagaattaaaaaaggacatctctgcacttgaagctaaccaatactgtagacaaggaaggctgaaagataaaagagcatttaaatgtattggtagtgaagattgtcaaattaatttaacttgcgctaatttttcaacactaccaagtcagtggggagtagccccttactataaaccttctaaagaaggggaagaacattcttcaaattgtccatataataaacatcataaggctaattcaaaaaatagactggtttcaaataaatcatcttttaaaaagacagggcatttcaatttgattcttgacaatggaggtttcactaaatctagttcttcttcacaaagcaatgctggcagaagtagtagttcaattaaacatctttacaccacaaatgttgatccaacacaaaaaaacgttaaaaaaagaaatgctgatataggctcattaaagaaactagttgatgtatttgaatcagatgattacgacaactcagcaacaactgtcaaaataaactcaaccccgatttcattagaaaaattatttcatagtcttgatgaccacagtgagttattcaaagaaattcgtgtgtactttggagaagctaaaatctatgagcgcaattctgaagataacttctacatcattgaatacacaatggaaagtttccatagaattaataagaaaatgatcacaagaaaaccatcaatattgatttacaagaatcaaattcaaaaacatagacacttaagaggtcttcaaaaatacgtaaatacaaacagtacgtttaattgttacttttttggtattccaacacttcatgattacattaactttgaactgaaaaataatttttataacatattatttagatagaattgatttataatttgaaaaatacttattctccccccatcccccgtgcaccgggggctccctcgccggtaggcaggaacaaacggttgtttgttcaatgccaagagggtttggatggcgctgcatatgtcaactccttatcctcacttcgttccggtaccgttgacacatacgattaatcgcatcacctgattttataaaggtttagcagcttgtttttaaacgaccatgtcagcaacttcagctataaacacatctagcatttttttgtgtttgtctgccagttcagcttctgcaatcatctctgatagatcagttttccctaaatgttcatcagcttcaagcaccattttcatagtgggagcacaagagttacgaagccagtttcttgatttctgatagaagtctttttatggtttgacgtacaaagatagtctcccaacatcccctataaattcagaccaaaaaaggcttgttttccaatgctctcgagtgatgttttcatcagcatcaacgaaccttacatagttattaaagatggtattgaagaacatgtaaaattctggaccccagaacaatttcaaaagtttatcatgatatttgatgataacaagtacagagattttttcaagaaaatatattatactttcgcttacttcacaggcgttagaattggggaacagcttgcgttagaatggaaggattttaatcaatatacaaatgaaataataataaataaaacattaacaagttttaagcaaggaaatgatttcctcgtcacgtctcccaagacctctaaatcaaacagagtcattacagttaataaaaaattatcagctttactcgaaaagtggaaagatcgacaaaaagaagcattagaggaatacggtattgagcaaactgacacaacaagaattttcaaatttaatcatagaacaccaaatagaaatcacttaaatgaattcataaagcaagcatgtgaaaaatacaaccttgatatcccaccaattaacatccatgcatttagacactcgcatgtttctttgctcattaatagtggagaagacattcatattatctcacaacgtttaggacactcgagaacgagcacaacatacgatatatacggccatcttttccccaatcggcaaaaagaacttgcagatcgattagataaccttttttaattgagacttctatcgagaaaggagttacttattcaaatatgccaattagtgaggttagaaagctggttggtttttgatataatgaaaacaaccaatttattctaaaagaggaaatgggggatttttatgtcaacaaggatggttcaacttaccgagcctgaaacggggaacttttatatgattccagttgaaaggatagtcttgataactgaaagagatgatcatgtagaagttagaatcgaatcaagcagcagcaacttctctattaaagtaagagaaacttatgaagaagttcaaaatctaatcagacccaacggtgttcaaattttcaaataaccgatttagtcaaagattaataggacccactgaggtccttttctttacatacatataattaatctggaggaacatagaatgaacttcttcttagatacaaatattttatttgacgatccgttcctgaaagggaattataatcgacagttaaccgagattgtaaggatgagtttaaagttagataaagagtacttaaaaaaaacagggtttcaatctgaatttttacatgaagaatataaaatatacatatcctctgtagtttacgaagaatccaaaaacaaatacatcgaaaaaattgaaaaaatatttaaccaattaaaagactttaatactggcattgaaaagtatatggattcggagaaaatcgccgaacctccttttactttggatcaatgtaaaaggaggtttgatgaatactatggttcactaaaacaagatggaatagtggaaatccttgaaccgtataacaacattacaaaagacttgatcgaccgcgctgtacaaaaaagggcgcctttctttaataataataaaaatgagttcagggatgcggtgatttagttaacctattcatcttttgctgaaaaaaatgaactcaaaaattgttatcttattactaataatgtaaatgattttgctgatttagagaataaaaataaagtacctcttgtattgcattctgaactaataaaagatagcaataaatttatcgtgtataaaagcatcaaggaacttgtcacttctgatggggagtttaaaaaacgtcttcaaatgaccaatgagatagctcaccatttgaatgaaagtttggaagatatagtattactcacgaagttacgagctttgaaggacaacttggatgaccataaagctttaagattgttaagagaaagatctgacttacaggagactatttttcataaaatagttcacgaaattattaatgatcaattagatcgtggacgagaaccgattgatccattaaaacggtacattattcctccagagtatggtgggttcgctgagcctcatacaccacttgatatgacggttaatattattgacttaacaatagatgataaagaaatagtggaaaactcaattcttattacggcggaaataaaagtaccatttgatatagctttatataatgatagatatgaacgctctaccatcttccaagttgaattcatcgtaccattatcttttcttgttaatttagatcagaaaatttcaaaattagagtgtgatactccttatcataatcaacctgctgttgaacgatctaccagtcatttttaaaaaatacccacaaaaaagaaatgggaaaacccatttcttttttcttatcaaatactatcaataagaacttctgatttcgtttttaagcctttttcgagggcactctttaaaagacttataaaatcttctccgtcactcgtaacaaaataatttgataagtcagttatgtcctcacttatattatctccccaaggcggacgtttattaatgtccgcaatatcccaaataacttgtgaaggactgtattctttcagtctttctttaatatcttttaattcttcaagggcagcttcaatgtttttggtttcaagctttccttgataaagttcatttaataaatgcggatattttgatccccaaccgtgttcttctaaatggtagctcacagttgaaaaaaatgaatggaggaagtctccatgtccaacctgataccaataatatttaaccttaaacccaacagccatcgtgttcacctctaattggttttgaatttaatatctgctttcccattagtctttttcataattttatcatataaatcgtccattatttcttcagaaactgattgtcccctaatatctatgattattgtttgtttagtattacccggaaggtcagtcagacgtttttcgacttgtttagaaacattgtttactaacctgcttcttccactgggcgtagtgatcttatagtttttaacctctatactatgcccatctttataaaagtctggacgggaacttcctttctttccataagggacctctttgccatttataaatgacttttgttcactgtaattaggataatcttttccaacatctttttcagattgtcgccaggacggtcttttaggaacactaggatttgttgcatttaactttttgttcactccacgtagcccaaatccaccaagaacaccgagagcctgattaaagctattctgccgttgttcatcagatattttattcccaaacatgtctcggccagttatagcttcactaaagccattcgctgaagcaagtccgtaaagtcctttacttgagttttgaagagcatagaatgttttaggtgttttatatatttcgagggctttttcagcttttgagatagctttgcctgttgaataaacagcttttacacctttccctaatttaccggcccatcccacaataggaacataacctgcagcagccattgcgccagctgccacccgttgcccatcagttaatttttcaccagttatagggtcaactccatcggcagcccttttataatcataatatccagagacttctcctgtaaaattacaaacaacatcccatgtcttttcgtaccatggacgatttgcaagctcttcctgttcttttgcaatccttctttgctcagcctgctgatctttaaatgagatataatcagttgattgtttttttacatcctcagccatcttgtggacttcactgcctctataagctttagcatcataatagatgggtgaagcacttttaccttttgaagttgcaccaatcaaggcttgataatctgcctgaatcatttgttcattagtttctgatagagcatattcagatgttagattttcatcgacttcacttattttctcgactgtgttttttcgttctttatcagcagaagataatttatctttaaagtcttctgttgaaaaaacatctagaggaaggatgtcgtgtatatcatttaagatgtctttgatcgcttttttctgttcagacatgatggcctttgatttattattagcattaaccaactcatgttctaagaaggattcttctatgtatgcatcagataagttagcatcttccaagatacccggaatacttgttaaaaaagcaattttcatttcaatcagatcaatccattgatcagctatgccggcctgatcctcataaaatgatttgatattatcggcaccttttccggaaaactcactatcatctaagtcagcaacagctttgaaggctttctttaatttgaccattttactttttaattctttgtattcttttgctcgattttctgattctgaaagaagtgttttcgcttcaaataccttcatgaccatatcctttctaaagagtttaatatcaaaatattaccataggaaaatttaagaagggatggacacgaagaattaatccttaaaatgatgttttagacctgcgacttatttctcaaattccggaagcttcttcaagaatttcttgatcacggtcaggaaggtatcctttctgaccctttatacttttagtaagtggagtaaacaggagtaaaaataaatcacaaaaaaagaaaaagaacccgcgaaaccctaatattacaggattcatgggtcttttattgaaatttaaccggtaatcctgtcggattacacgttttcatatgttacgcttcttcagcttcaatcactctggattgatcatgaaatgccccttgatcaatttcctttgtgaccttacttgtaataagaccggatgtcatgcttccgctgacattcaaagcagtacgccccatgtcgattaacggttcaattgagattaacaaaccagcaagcgcgacaggcatgtttaatgatgataaaacaagaagcgccgcgaatgtggctccgccgccgactccggcaacaccgaaggagctgatggcaacgactgcgataacagtgataataaacaccgggtcaaatggattttggccgacagtcggagcaatcatcatcgccagcatcgcaggataaatgccggcacatccattttggccgatcgaaagaccgaacgaaccggcaaagtttgcgattccctccggtacacccatgcttctctgtgttttaatattcagcggtaaagcacctgcgctagaccttgacgtaaatgcaaatacaagtacaggcaccgcttttttcaaataaatcaccggattcaagccgctgaacgtcagcagcagcaaatgaatgataaacatagtgattaacgcggcatatgaagcaatcacgaacatgcccagttttagaatgctgtcaagatcactcgtggcaattgtttttgtcatgatggccagcaccccataaggcgtcagtctcaaaatgagtgtgacaacacgcatgacaatggcataaacggcatcaaccagttttttaaatgtttctgcctgttccggctgtttgtgttttactccgaggaatgccactccaaggaaagcggcaaaaataacgacagcgattgttgaagtcggtctagctcccgtgaaatctaaaaacgggtttccaggcagcagttcaacaatctgctgcggcagcgttttcgctgtcatatcctctgatttctgctgaagctcctgcccccgtgaaagctctgtacttccttggtcaacctgaatcgcctgcagatcaaatgaaagcgcggacgcgataccgacagctgcagcaacagctgttgttgctactaaaatcccgataatcaaaccgctgatttttccaagattttttgtcagcttcagctttgtaaatgcgccgagaatcgaaataaagacgagcggcatgacaaccatctgaagcaatttgacatatccgcccccggcaatattaaaccagtcggctgtttgaatgactatatttgaagtcgggccgtaaatcagctgaagcgcaaatccgaatacaatccccagccccagcgcagtaaatacacgtttagagaaggaaacatgttttttctgcataacaaagagccctaagataagtaaaaataaaataaatacatgtaatacaaccagtaaagtctccaaagcaggtaaactctcccttcaaattttctcatttactatattacactaattccgatgggtcaagtgcgaattattttaacttgtcaattcaagtaaaaaaaccttatataatgccttttttgttcttttctttcccttccatctttagtaccttatataagggtgataatatttgctgaaagaactgtttgtaaatttgaccattttaatcacatttaattatctcttcacccacctgtttaaagaaaggctagtacataaaaaagacagcatatcctttcaagctgttaaaggactggcctgcggtttgctcggggttattctgatggtttttggatttacctatcagcattcaattattgatcttcgaaatatccctattatgattgccgctctttatggaggctgggtttcaacggcaacggccctggccatgatcactgcaggccgcttgctgattacgatgaacacatctgcactatactcggttattatcatttgtatcgctgccattccgtcactcattgtttcaagaagaaaaaaagttcaactaaaacatgctttctatcttttaataatcacaaatagcttgatctccttttccttttattttcttatagatttacattcatacgaacttcatttgtatttttggatcatatcaatagcgggcggcatgctcagtttatatattattgatcatgaaacaaatgcacatcttctttttaaacaatataagtttcaggcgcactttgactttttaacaggcgtgtataaccgaagaaagtttgaagaaaccacaaaagctctgtatcagcaggcggccgataccccgcattttcaatttgcactgatttatatggatatcgatcattttaagaccatcaatgaccaatatggccatcatgaaggagatcaggtgctcaaagagctggggttacgactgaagcagagcatccgaaatacagatcctgccgctcggatcggcggtgaagaatttgctgttctcttgataaagcagcccgaatcgctgaacggatcaggagcgctgtaagcgatgcaccgattgtattaacaaacggcgaagagctttcagttacgatatcactaggagccgctcattaccccaataatacggaacagccagaatccttgcccattcttgccgatcaaatgctttacaaagcgaaagaaacgggacggaacagagtgtgtttttcagaaaaaaaagaatgaattcaatgttcgaattcattcttccaatctgaaagacgtttcaaaggcagaaaagccgggacaagatctccccgatattctttttctataaatgccgctgtatcatcagcttgataaagctcaagaatggtttgcagcgcttcccggtcttgatcctccgctctgacaacaatcaaattcatctcttcctcagacatgagtccgccgctctttagcgtatgctttttcgggttcaggcccgctttttttgcttctgatggtttcatgacaaacacgtcggcaccgctcactgcatcctgttgccggacagcttttaatttcaggtgtctcggattatctttaatcatatcaactgaacctgttccgttaaatccgtttttcagcgttatcaaacccgattcctggagcactgtaagcgccctgccaaaatcgaacgctttatccggaacagaaacgacagctcctcgcggtatatcttggattcggtcatatcgttttgaataaatgcccataggcgttatgtatgtcgtcccgagcggcgtcaaattaagtttgtatttttgggtgaacgactgaaaatatgaaatggtttgaaaggcgttggcatcaatttctttgttagcaagtgcgatatcagactccgcataatcagaaaaagggatcagctgaatatccagccctgcctcttcagccttttgagcaatatagttccatattgccccgtcagactcagcaatcccgatttttatcgattcatgttctgcagacggtgaacatgcagtaaatgaaacgagaagaacaaggacgaaactgcatataagccactttttcattgtgaccatactcctatctatgtattagagcatgcaagcaatatcagacataaaaatcatacgctctcttagttgataaacgttgtcatttgtaatattgattaacttttaccttactcatatccaataaggttgtcaattcctattacttatcttcccaaaatgaaggaatactaaggcaaacgtatgatcacatatcgagaaagcagatgaatttccgcaaataaatatcaaattgaaaaataaatatggtattttccgaaaaaagtttcaataagcagttgttttttctgaagattactggtagagtaaaggtaattatttttgttcgaactatctttaagaagaaagttttgtaagagttttcgtcttgaaagtttgttaagagcaagaatagtgaatttaagcgttatgatcgctttaggaggaaatttcatgttagaaggtaaagtaaaatggttcaactctgaaaaaggtttcggattcatcgaagtagaaggtcaagacgatgtattcgttcatttctctgctattcaaggcgaaggcttcaaaactttagaagaaggccaagctgtttcttttgaaatcgttgaaggaaaccgcggaccacaagctgctaacgttactaaagaagcgtaagcataaattgatatgaaaaactgcaggtgcaaacctgcagtttttattttgacaaaaaagctgttttgcttatgcaaaacagctttctttattagtttgcaatatcccgcttcatgaagattccgaaagcaagcaacaggaagatgataaagtagatcgccagcatgacgatagaaaacgtcatagtcatcccttttattaacggtgtgccatccacatactgagtcaagtcgacattagcaaacaatatatactttgcccagtcaaatttcgctgcaataaatgcagttgcagtcgtaccggcaaccaacaagaagatggaaaaaccaaccgcaagagagctgtttctgaataccgcagacagcataaacgccatcgtcgccaccattaaagccgagacggattcagaaagatacgttgtggccaaatgccccatcatgttttgctcaatgacatggccatccttatagattaaatgaatattcgcggcggtttcaccacccgtcccgaagaagatcaaccctaataaagtagaaccgataaataaaatcaacagcaacaggagcccaaacaggagaactgtaatatatttggacatcaaaatttgaaaacggctgagcggccgaatcattaatagcttaatcgttccccaattaaattcgttcgcgacaattccggccgcgatgataatagtaaacagaccgctaaggatggtaaagtttgctgaatccgttacataagaccataccgtatagcccgtgtcactagggatattatgctcgatgcgatagtcgttgagtgtcattgtttctttatacccatctttcagtgaaggatcttctttgatttctttctttaattcggcgttttgtgcttgaagttcttgtttccaatgggaatttgattcaccagcagaaaaatgattcgccaaaaatgcaaatccaaccattgtcagccccagaattccgatcatcacccatgttccggcacggctgaaaattttgagccactcattataaatcaaattaagcatgctgaacctcctcttttgtttcacctgtcatttctaagaaacggtcctctaatgattttgttatgaccttgacctcataaatacggatttgctgcatcaccagcaattcaataaccgcagggacttcgtctttagccagtttgatttctacaccatttgtcttactcagcaaatcgtactgatttaaaacagcagcggcttcattcggctgctcaacctggaagaaatatgtatcgttctcatcaatgttttcatcttttacattttgaatatcgatcagctttcctttttgcagaatcgcaattcgatcacacatcagttccatttctgacagcaggtggcttgaaacgatgacagccattcctctttctcgggtcagcttctttaaatgatctctgatttctctgatccccgccggatcaaggccgtttgtcggttcatccaaaatcagcactttcggatcgtgcagaaggcattgtgccaagccaagacgctgtctcatccccagagaatatgttttcaccttgtcgtggattctgtctgttaaaccgaccagttcaacaacttcatcaattttttccttcgtgacacccttgaccatccttgcgtattgctggagatttttatatccgctcaaaaatttatacagctcgggattctcaacgatcgctccaatatgcttaatcgccttggcatattctttcgtaattgattggccgcaaatgaggacatcacctttcgacagcttcattaaccccaccatcatccggatggttgtcgttttccccgctccgtttggtcccaaaaaaccgaatacctcgccttcacgaatcgtaaaactgagatcatcaatgatcgttcggcctctgatgtttttagtcacgtttttcaattccaacactgttttcatcatattcctcctctttctagtaaacttccatttttgatttaaaccattgcaacacagacatgccttcctgttcacgaatatcttctacttcacgctgcgcaactttttctccattggcgaggatgattacttcgtctaacaaagtctcaatttcatcaatttcatgtgtcgcgatcacgacaatctgctgctcaaaatcaatgtacgacacaaggctgtttacgatggaatccctgaccatcggatcaagcccggaaaaaggttcatcaagcaagatgacgtctgcccgtctcgctaaagcaagaacgattttcagccggccccgatttccttttgatagctttttgatctttttttccggattcagctgcatctcattcaatagcttataagcctgttctgtttgaaaatcaggaaactgcgactgataaaaattcaccatatctttaacagtgaaatgcggataaaacatatcaagctcagtaagataagccgtttgacgcaccatttctctcgtaacctgctcttcatcaactttcacaaatcctgaagtcggaaacagaaggccagcaatcattttcagggtcgttgacttgccgctgccgttcggtccgatcaggccataaatccgtccggatgatagggtgattgacacatcattgacggccgtatggcggccgtatttttttgatacatgttctagcttgatttccattttagcctccctctgtgaatgttttaatcccttctaacatttcctctttcgttagccccagctctttcatttgcttgacaaagccttccagcacctctcgtgtcagcttgtctttcagctcgtctacgatttctgctttttccgcaataaacgtcccttgacctcttcttgtctccacaatacccagcctttccatctcactgtaagttctttgaattgtattgggatttactttagtttgaatcgccatttctcttactgaaggaagcttgtctcctgggagcagctccttcctgaccagcctataaaagatctgatcagcgatctgcagataaatcggtttcgaggattggaattgattgtccatatttacacctctactttacgatcaagcagttttgaagccatgatgagcagcaagaatgtgatgactatagcaataggaaaccctagcacagacagatggataggttttagttccaatctccaaacattgtggaagtggaaatcaaaattgcaatagactgttacaggccagaaatgcttttgagattcaaccaaagggcttatgatgtattcatcgaagaataaccacattgcgaccaacagaaccatcgcagcccaccgcattccgcgccaatttctgagagagtgaaaaacagtccaaaacacaatgactgttactgacatatctaacgaagaaataagcccatacatattcagcaaagccactgtactcgttatatcaacttgatgctccagcagattttttacagagagcatatgatacatccatatgccataggctgttaatgccaactgaatcacaaattgatagagcaaagatgctgccaatttagaagaaaacagccataagccgccatttggattgtacagccaaagctgtgatttcccttccttgcgaaggtgataaaaaacaaaaacaggagataagaaaagcagaaaaaaagcaactgcaacaaaaaaaccaaaaatgactagaggttctttcgtgcgagaagctataatatggcctgttcccaataagaaaatgattccgcatatccatactagcagccacattcttgaaagcttgatatctttctttaataaacctaaaaaagaattcatgtctttacctcccggaaaaaatcctcggtgtatgagtaacatagtacactagatcaaggtggaatacaacatattccatggatttatttgataaaaacataattgatggaaacagcaaaaaaggcaaacccgcatgagtaaacggatttgcctttttcattactttttcttatttttcatagagagcagcgcatcacgatagctgcggtcctgcattttgtcactttcctcagtgacctcttcttctgcatgaacttcatcagaatgcttaaacttttgcagcgcctgcctgtaaatatcatcacccattgtgtcacgcttctcttttggagaatcgtttttgacaacggatggcgtatgctcggcagcccttgcttcagcagggtaatgcgcttcgtttttttcctcttctggaggtgcgattctatcggttgcttcttgcttctcaggtccaggtgaggcgttgcggacgttaaatgtaataagggccgcaatgacaatgacagcagcaattattgctataataatggccatttcaacctctccttactgtcctgctgttaggtttcctgtgacttggctgacacgtcttcccaacgcgcgtccaagctgaataccttcctcagacattaactcatcactgtctaccggacaagtgacacctgctccgtaataagagccataaagtgcgttttcaggcacgttgccaggcagtccgacaacaatcatgccttggtggaacatcggcgtgattaaattgtgcattgtcatttccaagccgccgtgtgttgttgccgttgtgcagaagacagcaccgactttgttgatcagctcgccttcagcccacaagtagccaagtctgtcgatccaagttttaagaccggagctgattgttccgaaatgccctgggcatccccaaataatcgcatccatatctttaagcttgcggatatcagcctgatctacatggtcgatgaacacttcagccgcgtcgttttctctcgcgccttcagcaatcgcttctgcaagcactttagtatgttcgccttcactatcatacactacataaattttcattcaggaaacctccctgtacagattaagattccttagcttcttttggagcaggaagtaatgaaagctcctcttttttcttcttacgcaatttatcttttctgacgtcacgcaggaagatacttaaaatcaaacctgctacacagaataaggttgcccacataaaggcatcatttatccccatgacattggaatcgagtgacgcgtgtttataaatatgtgagtacacatatgttttcgccgtatcataagacacattcatattcaccattaaattcgaaactgcattttggaacgcatggaggaagttcgggtccgccgtgcttgttttatctgcaatttgtgaataatggaatgtcgtccggtttgtataaatcgtcgtaattaaacttgttccgattgatccgctgatttggcgaagcgtgttgctcatcgccgttccgtggctgttcagacgggcaggaagctggttcatcccggctgtcatgactggcatcattaagagagacataccaaatgcacgaattgaatagatcagcatgatgtgtgtatatggtgtatcaattgtcaattgcgtgtattgatatgttgttaccactgtcacgagaagcccgataatcgcaagcggtctcggtccgaatttatcgaacaaaatacctgagatcggtgacataatcagcataacgatcgcacccggaagcagaagcagaccggattgaagcgccgtaaagccgaccaggttttgcagataaatcggtaaaaggaacataccagtgtaaagtgccactgtaataatgatattaatgacactcgagagtgagaaaatgtcatatttaaacactctgaaatcaagcatcggatcatcatgacgcaattgctgaacaacaaaagcaacaattgcaatggctccgataataactgtagacaatacaatcgggtcggtccagccgtcagatccggcttcactgactccgtataataaggaggcgaatccgacaatcgagaggattgcgccaagagtatcgagtttgattttttgcggctccaccatatttttaaagatgaagaaagccacaatgataacaattgcgccgatcggcacaagtccgtaaaacataatgcgccatgtataatgctcaataatccacccggaaagagtcgggccgaccgctggagcaaacatcatcgctagcccgaaaatccccattcctttccccctgctttcaggcgggaaaattaacagaatggttgtcataacgagcggctgcaagatacctccgcccacggcctgaatcaaacggccgatcagcattgtagagaagttaggtgcgataccgcagactaacgtaccgagcgtaaaacaaaacatcgcgacgagaaagagactccgctggccaaatcgtgtaatcaggaaagcagataacggaatcaatacaccgttaacaagcatgtaacctgttgtcagccactgaatcgtcgttgcacttacgccaaattcagtcattaagtgcggcattgcaacattaagcagtgtttggtttagaattgccaaaaataaacccgccattagcacaatcagcaatgacatagggttttttgcatttttttctttgcctgtagccatctaagacaacctcctttcatggtttgatgactgatctgttttactcagaaattttaacagatgcattcattccaggaagcaccttatcagatgggtttttgattgaaattttcacaggaactttttgtgttacttttgtgtagtttccgcttgaatttgtagaaggaagcatatcaaaagttgagttagtcgcataaccaatttcttctacagtaccgtcaaatgtagtatcagggtctccgtcaactactacgtctacactatttcctacttcaatatccgcaatatctgtttctttaatatttgctgtgatgtataggttgtccatgtcaatcgtttgtgcaattgttgtaccagcttgtacggtttgtccgtttttcacttcgtttttcacaattgttccatccataatggattttacgtcaacagtttgttcgcctttgatttttgcaactgtgtcgccttttttcactgtttttccttcgtccagatcccagtcagatactttacctgctgctggagcagtaatagcagccatatcgcccgctacttttgcttcatctgtttttacgtagtttgtgctttgataatagtagtaagcacctccagctataattgcaagaacaacaatcaaaccgataatgttggtcagaattaaacgtcctctgttcattttgttttctcctttcgtttcatcctctatcattttgcggaaagctggtgaaaatatgtgagaagtttttaattaccgcttttttctgaacagccttcagcaagcttcgttaagcttccggctagtttgcgcaaatactgcagctgggaggtatcaagcttttggtacaagccagcacccatttttgcatattgcacagcggctttttctatcagttcttccccctcttcggttaactgaatcatgacgatacggcggtcatccggactgtcatatcgattcatcaattggcgcttatacagaatatctgtcatccgcgtcacagaagcaggcttaagatcaagcgacattgccagcttgcttagcggggtgcttccgctttgatgaattttaaacatcagcaaatattgaaggactgtaatatcaaaaggctcaagcacaatctccaatatcttcttctgttttttatatatcgcccgagacgtatcgaagagctgttcaaaagtgagcaaagcacgttctgattcagtcaactccttttcacctcattcctcaataatagttcacaagataaaatattaataaatgaaagaagatttgtcaaaggaaaaatttctttttctcccgtatttttttcgcaagcgttttcttgcttttattaaataaaaaaaagccctgaaatgggcttttcattacgaaaattgatggcttacaccagactcttcatttctgaaaaagttctttagagcctgaaaaacatcagatttctgttttaaaatatagtacttaaatttctcatcttttacatttttatatgcagacattaacgttgaatgcctgttgtactgattgacctcgccgtaacagaatagattggccttcttcataatatcattgaccagtttcacacagcgcgcgttatcagatgtcaggttgtcaccgtcagaaaaatgaaacgggtaaatgttatagcgggcgggattgtacttttcatcaataagctcaagcgacttccgatatacggaagaacaaatggttccgccgctttctccctttgagaaaaaatcctcctccgagaccactcttgcttctgtatgatgggcaataaattcaatttccacagtctcgtattttgtccgcaaaaaacgggtcatccagaaaaagaagcttctggccatgtatttttcccaaacccccatactgccgcttgtatccatcatggctaaaacgacggcttttgattcgggctttgtgatgtcattccacgtcttatatttcaggtcctccggataaattgggtagaacgacggttttcctgacattgcgtttcgtttaaaggctgacatcatcgttcttttcttatcaatattaccggttaaccctgttttacggatatcattaaactcgatatctgtatgaatgatattgtcccgctctttttgctggagattcggaagctctaattctttaaaaagcgcttcttctaaatccattaatgaaacttccgcttcataataatcctcgcctgcctgatcaccggcaccctgcccttttccaggcccttgttttttgtctgatccatcccgggccacaacatctccaacctggctctcgccgtctccttgccctacatgtttatttttatcatagttataacggattttatactcatcaagtgaacggattgggatcttcactacatcttttccattagacataataatgctttcctcagttacgaggtccggaagattgtttttgatcgcttcctgcacttttttctggtggcgctgctggtcatcgaagcctttgcgatggagggaccagttttcctcagaaatcaaaaaatggccgctgtcattttgggacatgaattcccctccttaaccatttgtggtcgtgatacatacgtattccggcttgtgccagattatgaaacaagtctttcgaaaagatttatattcatcatatgcacatatgcacgtttaattgacaaactatttagaaaatgggacaaaataacccgccctattcggacgggtcacgttgcttatcggttcagcaggctgccgacatatttcagcagctcattggcgctcgtcgagttgtagccgtgctcatcaattaaacgggccacgacttcatttacctttttcagctgctgctcatccggcgtttttgtagaggtcgtaattttaacgacatccttcagatcagcaaacagctttttctgaatagcttcacgcagtctttcatgggaattgtaatcaaaccgcttgccttttctcgcataggccgagatgcggattaaaatttcttcgcggaacgcttttttggcgttttccgaaatgccgatctgctcttcgatggatctcatcagcttttcgtcagggttcatttcctctcctgtcaaaggatcacgaagcttgtttttattgcaataagcctctacattatcgaggtaattgtccataagtgtttttgctgattcttcatacgaatacacaaacgctttttgaacttcctttttcgcaatatcgtcatattccttgcgggcggcagaaataaaattcaaataccgctccctgtcctcgcttgaaatcgaaggatgctgatcaagaccttcttttaaggaacgaagaacatcaagagaattaatcgactccatattttttctgataatcgttgaagaaatccggttgatcacgtaccgcggatcaattccgctcatgccttcatcattatattcttttttcatatcctcaacgtcgacagagttatatccttccacactttccccatcatacagtctcattttcttgaccagatcaatatccgaccgctttggttcttttaaccgggtaaggattgagaacatcgcggcgaccttcaacgtatgcggggcaatatgaacatccgccacatcgctttctgcgatcattttttcataaattctctcttcctcagacacttttaaattataagggaccggcatcacgatgattcttgagtgcagggcttcattcttcttattagaaataaatgagcgatactccgtttcattcgtgtgagccacgatcagctcatcagcagaaattaacgcaaaccgcccagctttaaaattcccttcctgtgtcaaggaaagcaaatgccagagaaatttctcatcacatttcagcatctcctgaaactccatcatcccgcggttcgctttattcagctctccgtcaaaccggtaagcgcgcggatccgattctgaaccgtactcggcgattgttgagaaatcaatactccccgtcaaatcggcaatatcctgagatttcggatcagagggactgaatgttccaattcccgtacgcttatcttctgaaaagaagatgcgctccaccttcacatcctcaattcttcctccgtactcttcctccagcctcatgacatttaaaggagaaagacttccttctattctaatgccgtattctctgtaaaagtcatcgcgtaaatgatgggggattaaatgtagagggtcctcgtgcatcgggcagcctttaatcgcatatacagcgccattatctgtcagcgtgtacgcttcgagaccttttttaagcattgtgaccagcgtggatttaccgccgctcacaggccccatcagcaatagaatccgctttctgacatctagacgtttggcagccggatgaaaatactcttccacaagacgctccagagattcttcaagcccgaacagctcgcggtcaaaaaaactgtacttcttgcgcccgtcaatctcctctatcccgctgtcttttatcatattaaaaactcgagaatgagcagattgcgcgaccatcggattttctttaataatctccaaataatcggcgaaagttccttcccatttcagccgctgctcttcctctctgtacttttcaattttctttaatatatccataaggacctcctctatcatgtttgatacactatgcaaataaggtactttgatacaatctatgccgccatctcgtgatacatgctttggtttcttaaaaataaagatacttatacatcgttgacaaggcagactgcgaccgttcataataaagaaaaatacagaatcatccagactcggacagcacggaaaaattgaagagggggagagacggtgaaaacaatcatcatgatgggtgtcattgtcacttttttagtatcaatttttaccgcaggatacgaaagcaagcctggaaaagaataaaaaagggtgctcctgaaagagcaccctttttgtataacagaacaatgttttacagttttgttttttctttaatctgtgaatgcggatcgcattcatatttgttttcgtactcaatcgttccgatgctgcatcccggcccgatgatcacttcttttcccctgacaactgccgcttcggtattctccaaataaacccgatctccttctatgacatcggcgatcagcttccctttcttccggttaaaaaaactcgcgcgtcttttcactgtaattgttgttccgccgatttcctgcacatggcttatatcatggctcaatcccagcttgatctcacccgaatttaataacccggatacatcaacacagcctgtgacatggaacatttctgtttcacaatcaccttttacgctaagcttccctttcacatcgcaggattctccagtcatattcccgccaatttcagtctggcctttcagattgaatcgatcaaattgaagtgagccgctgactttcattatcccatatatattgattttgccggctgtcagatcgcctttacattcactttctccgagcacacgcagccgctcagtctctgcttttccgagaaaaaggcccgttccgtatatgcggcagcctacagcagacagcccttctccaactacaccttctcctttgatgctgacattgtgatacgcgcctcctgcggcatgcccagcgccatataattttaagtttcccagttttgttgtctccattacgatcctccttacaactttgtggatgtttcaaccgacgcgcttggatcacaggtatagtccccgctgtattcgacggtttcaatctggcaatccgggccgatgatcactttattaccgcgcacggttttcgcctttgtatttgtcaattcaatcacgtcaccttcgatcagctctgctgttagaacaggctgcggcatcaatctgagcaatgtcagcattccttttctgcaggtcacttgaagatggcggcagccgatctcccgcgcatagctttcccctgcagaaagcttaatgatcacctggtctgcatttaaaagcccgctgattttgcatttcccttctgattgaaaggtttctgtttcacaatctgcttccatgacagcttttccgctaatgtcaattccatcagccttgacagtgccgccaaatgttgatgatccagcgattttcaattgttttgcagatacctctccttgaataaaaccagtgccattcatccggatagattctgcttcaacgtctccatgtatctttcctgaaccgctgatagttaccgctttcgctttgacgctgccgtccgcttttccgtttccattaaaagaaaaagtgtcacactccacgtccccggccactgtcccgctgccattaatctcaactgattgaaatgttcctcccttagaacttcctgatccatttatcaccagcttttccactacatccattgatggccctcctgcataaatgttgtttttaattcctctgaagcttttaataaatctacccgttccacaacctttacggatgattcaaacaaaatgctgtccgccgcagccgctataaaacaagttgtgacaccgagcttgcggagcacaatcagctccgtctgtttttcaatctcttcagtatcatgcttctttaatacctctgcagccatttttgcttctgcaaggctgacatttccagactgcagcaggccctcaagcacaaacagcgaaagcaaatcgctggatgaaaaaaccggacttcctccgtcttctgaataggcttcaagagcaggccttgaaaccaaacctttatgaagcaattcatcagcggtcatgctgacatccttcattttcggcgacagcatttccctcatttcatccaaagacaaattttctttcatcttttgaatcattgatatacgttttaaaatctcctctctcggaaaaaacgtctcttgccctgtaaatgtggatttacgaataaaccattcctcaggtattaagtttttccgcttccatcgatacagctgaccgtatgaaatcgatgttctttcaagtaattcttttttagagattaattgttcttccataagtccagctcctttgatgggtacattgtaacataacactgttacgttgttaagcccaaaaacgaaacaaagcatttcaacatccgcaaaaaaacccgcccatcatcgatgagcgggtttttcactattttaaatcacggtaattttgctggcgcagcgcttcataaacaagaatcgcggcagtattggacagatttaacgatctgacatgctctgtcatcggaagacgcaggcagcggtccatattattttgaattaaatcctttggcaaaccgcttgtttctcttccgaacacgaagaaataatcctcgtcaagatcagtgtaatcaaatgatgtatgaggctgctggccaaattttgtaataaagaaaaacttgccttttttatatgcctcaaacaattcttctaacgaatcatgatacacaacgttaacaaactcccaataatcgagtccggcacgcttcagcattttatcatccgttgaaaagccgagcggacgaatcaggtgtagcgttgtattggttgctgcacaagtacgtgcaatattccctgtgttagcgggaatttctggttgatataaaacgacatgtaatgccacaatgttcacctctgtttttcttatccgcccatcattataacattaattactcttttgtcgtatcatcaacgatatgaaaaaaggcatatcgtattgacggcgtgtatgccgtagaatcctcatatgaccaatacctcatcctgctgtcataagtctgggcgttgacaagcggcatattgcctttgtcctttgccacgacaatcgttgtatgattaaaccggccgtctccttcgaagtcatagcaaatcacatcgcccggcatcagttcttccgctgatttcacccgcaccgcacgcagtccggcctttgaattcgacaaatacattttcatagagtgagccaccgtccagctgtagctccatgagctttgtttcatccaccagcctgatcccctgttcggatgaccgcgcatcggcgcgcctcctgcatgaagacactgagaaataaaatttgtacagttatcgctgaaatttttataagcaggattgcgcttgttccaaaatttctcggcatattggacagcgccgagacgatcgtattgaaaagccctgccaaacgcttctctttcctcttcagcttcagaatagtcaataatactggtcccttcatgaaatccagccggctttttcgcaatttcctgatcactaatcaaaatgtgatcatacaggaaagccattcgctcctctatgtgctcttctatatacaagctgtcatcttgttccttacacacgtattcgtaatggatggtatacgaaaggcaggtcgttccgtcatcctcaacccgcacatgattaatcacggcctttgctttcgcttttatgatgtcaactttacgtttttccagaagctttttcttacgctccatgactttaaggtctccgacttgagactcctgtctcatagcatgcccgttaaccagaaagcccagccgctcctccgctaattgttctaaaatgtacttcaagctcaccccacccgccatacttttttatagagaaaaaacacttggatgatctcaagtgttttttccttctgctctatacgtatgtcaggacaggccttgtttagtcatgcctgaagcttttagcaactcaattcctttttcaatttccagctttgcctcttcatccttctctttttccagcgctttttcaagctcttccgcgtaggcggggtctccgatttttccgattgcccatgcggctgtccccctgatgacaggacgcggatccttgtgcatcagttccgtcaattcaggcagtgcggaagcatccttaaaatgggcaagcgcgagaatggcgtttcgctgaatcggtttttttccgcgccaagaacctgagacatgcccgaatttctccttaaattcccgattgctgatggccaaaagcggcttcaataacggtttggcaatctcaggatcaggctccatttccggatgaagatgaaaatccttccctttattgagagggcataccgtttggcacgtatcgcacccgtacaggcggtttccgatttttgtccggaattcatcaggcaaaaatccttttgtctgggtcagaaaagagatgcagcgctgcgcattaagctgcccgggattaaccagtgctcccgttgggcaggcgtccaagcatttcgtgcaggacccgcacatatcttcaatcggcacatcaggctcaaaagggatatttgtgatcatttccgccaaatacacataagagccatactcgggtgttgtgatcatacagtttttcgcactgaatccgattccggcacgttccgcaacggcgcgatcagacaattcacctgtatcaaccattgacttcgttctgatatcctcatgcttgctttttagaaaatcctccagcagatcaagcttttccctcagcacatcatgatagtcttttccccaggaagctctgcaaaaaatgcccctgcgctcagttctcgtgcttctcggcgcatccttcattctggaaggatatgcgagagcaattgccactattgatttcgctttcggcaaaagaagcttcggcgtcacccttttttcgatatctggctcttcaaagccggagagatagccgagtgattcttgaagaatcaaacggtcttttaaactgtcaaaagtatcagcggtcgtaaaaccaatcttgtctacgccaatgcttttcgcgtattcaattaattcttctttgagctgataaacgttcatgttttgcacagcctcctttctttgtgataaaacgacacagcgtttataataggttgatatcacgtaactggagtgaatgctagtgaatatcaaacttgattctgttattactgaacgtgcggccggcttacatgcagctgctgtcatttatgagaatatcgaagtcggctcctcaccgcaaatgctgaaaggcagactccgcctgtttcaagaatccttgtttttcgactatgcggacggcggtatatccgatgaatccttcgtcaaggaatggcagaaactctttaaacagcttaacccttcatttgagggagaaacaaccccaatggaggacatgctggtcccgatatccaaggaacaattcatggaaagtaaagactcggcccatgacacaatcgattttttcgcattaaaatattctctgcctattatgatttatgatgccggaaagcttcatgagccggtccggatctcattgggagaaaaagaaaacatactgcttttctctgatgaaaacggcatttttggcgatttcaaaaacagcgtcaaccactatcccgtttcaaacgagactaagaatatgctgcaaatcatttttttcccgccatcgattgagaaaagcagcgctgttaacctcttatcatcattaacgaaaatgtttgaacaaattcacggcggcacccatacagtacattggcttacgtaaaagaacacgaataccgtgttctttttcacataaaaaaacgcaatacttcgtttatctgagaaacgaaacactgcgttaataacgtatgtatggagcgggtgatgagaatcgaactcacgacatcagcttggaaggctgaggttttaccactaaactacacccgcatttgtgattgtcagcaacagtaccgctctgactttttttatattacatgtttatttatttttcgtcaagggaatataaaaattttgtcgaaaaaaaagttatctttttgtaaagttgttaagttccatttacataatgttaagtatactatacaatataatcaatcgagattgtgaaggggacagacgtcatgatgaaaaataaagtaaaagagctgagggcacgcttcggctattctcaggaaaaactcggagaaacggtcggcgtcacaagacagactgtggcagcgattgaaaaaggcgattatgttccctcactgctgttagcactgaaaatctgcaaagccttctccatgaaaatggaggatgtcttttggttagaggaggaaaactaagatgagcatgaaaacaaaagcagcttttcaccttgttttatttggccttgcatgctgggcgctgatttcatactttgaagcctcagaaggcatagcatcttttttcggcacaaagagcggcgggatggtatttgatttaaacctcactccctttattctgtttgttgcggcgtctgcggtttatttgtacttacagaaaaaaagccgccctgccagaaagcagctacttctgcctgatgagtttgaagagcaggatgaaagagagcagatgatgacggcaaaagcatgtcgcgcgtcatatatcgctgtctacttctcgctgcctgccgcagcggttcttctcattttttatccgctatttcaatcgcgcattccgtttttccctattattattgtgtttatcatcatgatcatccagcacctttcctacgtcatctctttcaagaaaaacgaaaaaaactccggcgcgctgtaatcggccggagttttttcttaccagcttgcttttttcacaccgggaatctggcctttatgggccagctccctgaaagcgattctggacattttaaacttcctcatatatgctctcgggcgccccgttaccatgcagcggttgtgaagccttcccggtgctgaatctcttggcagcttgctgagtgcctcgtaatctcctttttccttcaactcgcgtctaataccagcgtattgctcaacaagctgttggcgttttaactcttttgccacttttgattttttagccaagtcacatagcctccctttaaatcgaaattgttacgatttaaaatgtatcattcaccattcaaaaaagcaagcataccgctttgtaaaacagacggcctgaagccgcccattctaatgatgcaattccacataatacagtaacgcatcttgatgcttaatgagctcttttttatgttcagaggtgtgcattgtctcgtcagtccctctaatactgctgccgatcaaagcaggcttctcgaaagtaatcggttccggcgatgaaatattctgagtcatttcctgtgttgtgctatcgtcgcgtttcaccgatgaatcagccgctatagttccctgtttatccacaatgccaaaatgaatggtggtatgtttattctttccttccccctcttcattctcaaaataaacaaattgtatggtatcagttttttcctctgaataatctgcacgaaccggtccaaacctctcaacaagctttcccttttgataatgttcgatgtacatgtcagctgaagaaataccttcaccgatattgacggcttcggcagtgaatgcctgtgaagctgcgacatccattctgtttttttcaagatctgatatgtccgccgctttgatttccatctgttttgaatgtccgcatgctgacagcatagctatgaggcaaatgactgccgcgcttctcaatgttttcagaaaaaaagccccctttttttgaatatcataccatgttcggggggctgtattttagttaaactcatgcatttttctctttgacaaaataagtgtttcctaccgcttctccccttttgttctgaagctttctcgtccgatcattttcaaacggcaaaagcggaaatacaagctctgcaaaataatacgcttcttctaaatgcggatagccggagaatataaacgattctatgccgagtgcctggtactccgctatccggtcggcaatcgtctgcggatcaccgacaagagctgttcctgcccctcctctgaccaggccgatccccgcccacagattcgggctgatttcaagcttcgtccgatcgccttgatgaaggacggccatccgctgctggcctgaagagtcgtaacggctcaaagctgcctgcgctttggcaatggtgtcatcatccaagtggctgatcaagcgctctgccgcttcccatgcctcttgttcagtttcacgggcaatgacatgcagcctaatgccaaatcgaacggatctcccttcttttgccgcttgctttttgactctttctatcttttcttttacttgttcaggcggctcaccccatgtcaagtacacgtctgtatgctttgcggcagcttcaattccagcctgtgacgaaccaccgaaatagatgggcggatgcggctcttgctgcggcgggaaaagcagattgctgttttccacttttatatgctttccttcataggaaaccgtttctccctgcaaaagtctccgccaaacggttaaaaattcgtctgttgcctcgtagcgctcatcatggctgataaacaggccatcgcctgccagctcatacggatcgccccctgccacaacgttgatcagcagccggccgtctgaaatgcggtctagggtggatgtcattctggctgccagagaaggctgcattaaaccaggtcttaccgcgactaaaaactttaagtcctttgtttctcctgccagtgccgacgctgtaagccacgggtcctcgcacgatcttcccgttggcagaagaactcctgtatatcccagcctgtctgccgcctgcgcgacttgtttaaagtaaagatgatccgcagtccgtccatcactttcagatcctaaatatctcgcgtctccatgagtcggtataaaccaaagaatttccatattcatctcccctttatatcttttatccttcgtagctgtttctccactttaacagctttcgttcaagcagcctgacgaaggaatccgtcagctttccaaccactgcaaaaatgataatccctgcaaagactttattcgtttgtgaaaactgtctcgcatccatgatcatatagccgactcccgagcttgagcccatcagctctgccacaacgagcccgagccatgcaatgccgagcgataagcgaatgcctagcaatatattgggcagggctgccggcaatatcactttggatatctgctgatgccatttaaattcaagcacccgggcgacttcaaacagcttcgcgtcaaccccgcggatgccgttaaacgtattgatatagacaggaaagaaggcaccgagcgcaatcagcaaaattttagatacttcgtcaaatccgaaccataaaataaacagcggcgtgacggccagatgaggtacggttctaagcatttgcaacgacggatcaagatacagctccgtccgtttggaaaatccggccaaaatcccgatcatcaatccaagccccgcgccaagcaaaaaaccaagtgccgcccgataaatgctgatttgcagatggccgaacagttcgccggacaaaataagctccttaaaggtcagaacaatcgtaacaggtgtaggcagcactgtagcggacacaatccccagcccgccgatgacctgccagatggcaatgatgacagcgggcagtaaaagccccttcataaagccgtatctcttccttccgggcttttttcgcaccgcttccgcattcgttttgggcagcgagcccgcagcctctgctttcatcattgatcacctcctgaggaatgttcctttaatgcttttttgataaaactgttatcgacaacatccttcacatcaatcttcttatctatcgcctttgttcgaaattgaaaatctgctgtttcctgctgcgcttttacaatgtcgtcactgatgacctcattcagaggttcagtatttttcagcacattttcgacgacctttttatcgagatctttaatgtcagaatataagtccgctgcttcacccagatgttccttttgccatacaacggctttattaaacaccttcagaaaacggaccacttcgtctggatgctcttctgaaaactttgttcttactaaagtaaaacccggtgaatataaatctgtgctttctccgttcacaaggatttttgctccgtgtttcattgtttctaaggacaagtacggctcccaaatggaccaggcatcaacagatccgttttcaaatgcggaagctgcttcatcaggctgaagctgaataattgtcacatcgttagctgacaaccccacttgatcaagcgctttatacaaaaaatcaaacccgctgctgcctttggcgactgcaattttcttcccctttaagcccttaacgtcttgaatgccgctgtttcgattgacaaggatgccgtttgctttcaagccgtcctgagacaaaccgatttctttaaagtcaatgcctgccgcctgtccagcgatcacaggcgaattaccgacttgagaaaaatcaagtttgtctgccgcaaggccttcaaattggggcggaccgctttgaaactccacccatttcactttgatgccttctttttcaaatgcatcttcgaaccagcctttttcttttgcgatcaaaagcgggcttaagctttgctgaataccaatacgaatttccttcaattgtttgtggtcaccgctggctccatttgctccacagcctgcgagcagaaaaataacggcaaccaatacaatgagtccttttttcatttccgcttccgccctttctatatccctgatccttctgcgtactccaaatcttctgttttctcgaattccgacagcactctctgtctgatcgcttggaaatccggagtcgtccggttccgcggatacgccaggtgaatgggcatcagcttatggattttccccggtttggccttaaggatcgcaagctcatttcctaaataaacagattcatctatatcatgagtcacgagaatcatcgttgtttttttcctcctccatatatccagcagcacgtcctgcaggtgttttcttgtaaaagcgtcgagtgcaccaaacggttcatctaaaagtagcacctcaggctcccgcagaagggcccgggcgatggctactctttgtgacatgccgcctgacagctcgcgcggatatgctttttccgatcctttcaatctgacaatctcgatcagttcatccaccttttgtttgacttttgggtcattcaaattcaagtcggctgcaatattctgctcaacagtcagccaaggaaagaggcggtgttcctgaaaaataaatccttgctgaatacccggagctgttacgctgcggccgttaatttccacactcccgtcatattcagaatcaagccctgcaataatctttaacagggtgctttttccacacccgctcggtccgataagcgttagaaattcgcctggtgcgattgataattctatgttctctaagaccgtgtttttgcggccctcttgaacaaatgccttttctttgatgctgatggtcacagccacttttatccctctctttctgccaaccccgccttcaaaaaaacaaaaaggcccccatctctgttcttgtagagatgagagccttcggcggtccgatcagctgcccaattgtttttttgtttgaataacatgttaattcaaattattccgatatgtcaactcttttttaaatacgatttttgatatccttgtttatcacttactctgcttgtttcgcaaatagagaaggaaaaattatttctccaaaaattattaagtgtcataaaaagctgttacaacaaggtttttcaacactttcgatactagatatcgattaatagagataactattttataataattataaaataatattgactttttacttagagatgatattatgttcttataaattccaagaggtgataacatgagttcaaataaactgacaactagctggggcgctccggttggagataatcaaaactcaatgactgccggttctcgcggaccaactttaattcaagatgtacatttactcgaaaaattggcccatttcaaccgagaacgtgttcctgaacgtgttgttcacgccaaaggagcaggcgcacacggatattttgaagtgacaaacgacgtaacaaaatacacgaaagccgctttcctttctgaagtcggcaaacgcacaccgttgttcatccgtttctcaacagttgccggtgaacttggctctgctgacacagttcgcgatccgcgcggatttgctgttaaattttatactgaagaaggaaactacgacatcgtcggcaacaatacgcctgtattctttatccgcgatgcgattaagttccctgatttcatccatacacaaaaaagagatccaaaaacacacctgaaaaaccctacggctgtatgggatttctggtcactttcaccagagtcactgcaccaagtgacaatcctgatgtctgaccgcggaattcctgcgacacttcgccacatgcacggcttcggaagccatacattcaaatggacaaatgccgaaggcgaaggcgtatggattaaatatcactttaaaacagaacaaggcgtgaaaaaccttgatgtcaatacggcagcaaaaattgccggtgaaaaccctgattaccatacagaagaccttttcaacgcaatcgaaaacggtgattatcctgcatggaaactatatgtgcaaatcatgcctttagaagatgcaaatacgtaccgtttcgatccgtttgatgtcacaaaagtttggtctcaaaaagactacccgttaatcgaggtcggacgcatggttctagacagaaatccggaaaactactttgcagaggtagaacaagcgacattttcacctggaaccctcgtgcctggtattgatgtttcaccggataaaatgcttcaaggccgactttttgcttatcatgatgcacaccgctaccgtgtcggtgcaaaccatcaagcgctgccaatcaaccgcgcacgcaacaaagtaaacaattatcagcgtgatgggcaaatgcgttttgatgataacggcggcggatctgtgtattacgagcctaacagcttcggcggtccaaaagagtcacctgaggataagcaagcagcatatccggtacaaggtatcgctgacagcgtaagctacgatcacaacgatcactacactcaagccggtgatctgtatcgtttaatgagtgaagatgaacgtacccgccttgttgaaaatatcgttaatgccatgaagccggtagaaaaagaagaaatcaagctgcgccaaatcgagcacttctacaaagcggatcctgaatacggaaaacgcgtggcagaaggccttggattgccgattaaaaaagattcttaatggagaaatgcaaaaacccgctgtagtcagcgggtttttttatatttagttacacattgcgtatgcttctcatcaatcttcatataaatttcttccatgagttccgcgctgtttataatctctcgtttgtttttttcaatcagcagctcaagcggcaaaatctgattcccgtaggtttttcgcttcctgaatcgttttctccccttttcttttttgactcccatcaataatccctcctttttcatacaaaaaaggcccttatctaaaagataagagccttcggtgtcccgatcagcaaatactggaaatggatattagctatattaaaacgcattccatttcgactgtcaatctattatttatacagctggctgccttgattcacaaattcttcagctttttctttcatcccctcttcaatagcatcccattcactaatctctttgtccttcgcataatcccgaatatcctgtgaaattctcatgctgcaaaatttcggaccgcacatggaacaaaagtgagcggtttttgctccttcagcaggcagggtttcatcatggtattcaagggctctctccggatcaagagataaattaaactgatcccgccagcggaattcaaaacgggctttcgataacgcatcatcccggatttgtgctccgggatgcccttttgcaaggtctgccgcatgcgcagcgatcttatatgtaatgactccttcacgaacatcatcacggtttggcagccccaaatgctccttcggcgttacataacaaagcattgctgtcccataccagccgatcatcgccgctccgatcgctgaagtaatatggtcatatcccggagcaatatccgttgtcaacggccccaatgtgtaaaaaggcgcttctttacaaatgtccatttgtttatcgacattctctttgattttatgcatcggaacatggccaggaccctcaatcatcacctgaacatcatgcttccaggcaatttgcgtcagctctccaagcgtctctaattcagcaaactgcgcttcgtcattggcatcagcaattgatccgggacgcaaaccatccccaagagagaaagcaatatcatacattttcataatctcacatatttcttcaaaatgtgtgtataaaaagctttcttgatgatgagccagacaccactgcgccataatcgctcccccgcgtgacacgataccagttgtccgtttggcagtcagcggtacatacctaagcaaaacacccgcgtgaatcgtaaaataatccactccctgctctgcctgctcgattagcgtatcacgataaatctcccacgttaaatcctcagctacgccgtttactttttcaagcgcctgataaatcggaacagttcccacaggcacggggcaattgcggataatccattcacgcgtcgtatgaatatcttttccggtagagagatccatcatcgtatccgctccccagcggatggcccacgtcattttttccacttcttcttcaatggatgacgtaaccgctgaattcccgatatttgcattaatcttcacatgaaaattccggccgataatcattggctcactttcagggtgattaatgtttgagggaataatcgcccggccgctggctacctcgtctctgacgaattcaggagacacatgctcacgaatggcgataaattccatctcaggtgtaatgatccccttttttgcatagtgcatttgtgtgacattttgacctgccttcgccctcagcggtttccgctttaatcctggatagcttacgtttggttttgcttttttataaccgttatcttctggttttatagcccgaccttcatactcttccacgtcaccgcgctctgtgatccatttttggcggagcggctttaatccttcttgaatattaatggttacttcagggtccgtatacggtccgcttgtatcatagacacgcacaggcgcgttttcctcttcgccgaacgatcccgtcgtcggactcaatgcaatctccctcatcggcacttggatgtccgaagaagaaccctccacgtataccttcttgctgcctgaaaaacttgacataatggaaatgttggcttgctgcactgaattgttttgcattacttttccttcccctttctacgtttgaaaggacaaaatcaagcccataaccagcacaaaaaaccggattcatataaatgaacccggttacagtcagaaagaaacatattattgcccagcaagacaataacaaaaacaattcctctacttccccacgctggtacgaaccagatcaggtccaaagggttaagaagcttgccttctctctcagcccgaaagcgggcacccccagtaactattgatttcgcactcatcttatcataaaatcaatctgaaaaaaagaggaatatagataatattcagccaatttcaccctaaatatttgaccggcaacgggatttcagctatttcatgttcagccatcatcacccgatatgcctttgcacccgaccttgaactcacagtctgaaacagctgatcatttatgaaatggagagcagccccatcatcagctgcatagccactgcataagaacttgttagatatcagctggtggtatgccggtctccgatccttttccccgtcataatggggacaaaagctcccttgcaaaaaacctaaacttttcaaacttgtcagcggtccggctgaatctgtcaccccttcctcaaaccagcagatcgcaccggcacttattccagctacaaccacaccgttcttccatgcttccctgagaatatggtccagcccccactctttccataacacaagtaaattccgcgtatttcccccgccaacataaatcacgtccatttccataacaaaagaagctaaatctgatgatggcggcttaaacaaagataaatgagacggcacgcaatccaatgtttgaaatgcatgataaaaccgctgaatatagttttgggaatctccgctcgccgtcggcaaaaaacaaatacgaggctgctctcgttttgattgattgaggatatattgatcgagggacaaattatccggctccatcgaaaaacccccgccccccatcgcaataatctgcttcatcatcacaccccccaacaaaatttgttgcttattatagcattttgtatagaagcaagaaacaaagtcaaatactttcttatcaggagctgctaaaaaaacaaaggaggtggtttcccattgaacaaagtctttgtcccaaagatattcttgatttgttaacaacaataaaaaccagcattaacaaatacactgtcgcaacaacagcaaccgaaaatccccacatcagaagagcattgcatgatcaattagatacagctgtttatctccatgatgaactgtcagatcttctgttagaaaaggggtggctcgggtgagcaattccaaatcgattcgcttttatcttacagcaaagaccacaaaaagagacgggatctcaaagatgagatgccgtctcttttttattgctccactcttcttaaagcctcatttaccgtttcttttataaacacgtcttcaccgcttaatcggtctaaactgagatcgccgtttctcagcctttcggaaatattgtttatatcctcctctactgtgatttgcagctcaccagccaaaaacattctgtgtaattcatctgcaaccaaactttctttattcacttccatccactcctttattttcaatattattcttagtctgtccctaggccgagacgaataataggaaaaaagtatgaatcaaacgaatcttttttcctccttcttacgtatatctgttgagaaaaaagaaaaaggggaagatctaacatgtcattttttaagaagcttgcggcaagtgccggaattggagctgcaaaagtagatacaattttagaaaaagacgcatattttccaggagaagaagtatagggaacggtacatgtcaaaggcggaaaaatcgctcaggacatccgttatatcgatttacagcttagcacacggtatgtcattgtaaaagacgatgaagagcaccggaaatacgctacaattcattctttccgggtcactggttcatttaccatacagcctggtgaagagcatcaatttccgttcacattcactctgcctctagatacgccgatcactgtagggaaagtagaggttgccgtggtgacagaccttgacattcaaggcggtatcgataaatccgatcatgaccgcattttcgttgaagcgcacccttggattgaaaatgtgcttgaagcaatcgaaaacctgggcttccgtcttaacgaagcagactgcgaacaagcgccctacttccagcgtcgtcttccgttcgttcaagaattcgaattcgttccgacttccggatattatcgtcagatgcttgatgaattagagctcattttccttttagacgaagacggtttggaaatcattttcgaagtcgaccgcagggcaagaggactgcgaggatggctggaagagatgtataatgacggagaacagcttgtacgcgtccgtttcagccaatcagagcttgaagatgcagaagagcttgaagaggtgttagaagagatcttagaccaatacgctgagtaagtataaaaaggagcctcggctccttttctttaataaaaaataaaaacccgtgtctattaagaaacgggtttttcaatataccggtggtcggggtcgaaccgacactccagaaggaacacgattttgagtcgtgcgcgtctgccaattccgccacaccggcaagttttacgtcgtatctaaccgacgaatataactatatcatggatctcataaagtgtcaacgtatttcaaaaaagtttttttggaaataaaaataaaagtgttgaaagactagctatacagccgctttataataggcctcggaacttaacttgttatgataaatcaaagcattaaaaaaatgatctacttatgtagatcattaatatgattagttataatgataaaacacaaacaccaattcaacttaccatgtaagtaaaattggtgccgagggccggacttgaaccggcacggtagtcacctaccgcaggattttaagtcctgtgtgtctgccaattccaccaccccggcaataagaaggcgacacccggattcgaaccggggataaaggttttgcagacctctgccttaccacttggctatgccgccgtaattggagcggaagacgggattcgaacccgcgacccccaccttggcaaggtggtgttctaccactgaactacttccgcattttaaatggacttaatacattatatgcagttgatataaaaagtgagactgggctagctggattcgaaccaacgcatgacggagtcaaagtccgttgccttaccgcttggctatagcccaatgataatatggggcgattgatgggaatcgaacccacgagtgccagagccacaatctggtgcgttaaccacttcgccacaaccgccataatctcaagatgtcataaatttggcaggggcagtaggaatcgaacccacaccggaggttttggagacctctgttctaccgttaaactatgcccctataaatggtggaggggggcagattcgaactgccgaaccctgagggagcggatttacagtccgccgcgtttagccacttcgctacccctccacattaaattttgaaaaaacagtgccggcaagaggacttgaacccccaacctactgattacaagtcagttgctctaccaattgagctacaccggcataggcgactcattggatcagaatgggtatgcttatggaaataataaccctgtgatgaatgttgaccctgatgggcattgggtttggcttgtggtaaatgctggatttgcagcctatgatgggtacaaggcatataaatcaggtaaagggtggaaaagtgttgcttgggcagctgcttctaactttggccctggaaaagtgctgaaaggcgccaagaaggttttaggtgttgcgaagggagctaagaagtatttaaaaccaggtaaatatgccaaaaggtcaatacctgcaagaagtacaagtagcaggttgaataaaaaggaaagaagagtattaaacaagattgggaataaatatggctgtcacacttgtggtagaaggcatcctggaactaaaagtggaaattggattgcggatcaccaaccagtatcaaaattaaggaagaaaggccagcgtcaaaggctatatcctcactgtcaaacttgttcgcggaaacagggaggatatacgagttctattttgagaaaaagacatcaacggaggtgaggaaattgggaaaaaaagaagcgattctagcattacttaacgattcattcagaaaggaagagttccctcttatttgtaattcgaattttgattttgccaaaggaaaactttcggtatttgttgatggagataactggcttttaacgatccagctgtttggattgtcgaaattgggtccagccattgatttttatacgtttggaaatcagttaataaataatgcagcaaattatttagtggatgaaccgttttgttttgtagataaattaggagatcaactagagttggaagatgtagaaccaggttttacaaggaaacaaatcaatgtgttccttagagggagaacatttaaatttttcattgagcaagaaatactagcaaagattacatcagagaatgaatggattacatgtttaaggcaaatgattaaaaatcgtttattcctcgacacactctggttgacaaaacaagaacaactacaattggcaggtctctcctgcgattatgaccaactgtattcaactgaatcttggatgcatcctgaaacagaaaaggattttcctagcctttctcctttctttcaagctattgctcaagcaatttgtcgtaaagatgctgcatatatccagaaacttgagaaaggtaacactgattggtcaacatggacatattcagattctgttcagtattattaaagatgatacggatatacagcctatggctgtgtatccataatattttatcgtatgatgatcatacacgatataaaaaggatatattttcctgaaaaggtcgaaatcattatttagtttgcaagtataaagataaaaacagtaaaaaaggagaataaacattgattaaaaaaacagaaattcttagtctattagatgacgaattcagtgagttaaatcgacctctttttgaatggcgcgaatctaattatattggaagtaaatgtaccttagtacgattaaataaagaacactggttactggcaatccaatgcttccaaattgataatgaaggaccctttctgtctgttcatgcttatagtaactgtttttcagagaactataaattgatcataattaatgacatcgttttaaagaccaaagaagatgaggaagtaacatatagtgaaagtaactttaatcaattaagcgaagcagtgaaaataaaaattgcagattccctttactgcataaatattcaccaaagaaatgaattccaaaagaagaccaaagaaaaggcatggaaaacatattttagaaatttgtttgaggatgccaattttagagacgcactctggattaaaccaaaaaaacttaagagtgaactaggtttaaaaggtgatgatgaaggtgtatacgaaacagagaactgggaatatcctgattatttaacagatccaagtgaattaatttcatttcaatcttttgctcaataccttgaaagcggaataggtccagttaatgtaggagttcctaataaccattggaaagaatgggaggattacgatatcgaatgaatttggggaaacgtcaataaatattgtgataaagtccgtgacttcttatgggtttctctcaccttcagcttatatggagagcaatcagcattccaccaatgcggtcagaacttaactgtaaaagactatacgatttatgggtaaaaaccaaagacaatatatttaatgaagtatataaacgagtaagaaaacatatcttgccctttctaacctgggagcataaccaatgaataaaatcatcaacacgaacacccaaggttgttttttccatgctgatccacaggggcgtgtctacattggaaaagggttgaaaggagatatcaccatttcaatctatgatccttccggtgatgttcgggattttaaagtgaaagagccgattgcatacagcgatattctgctctttcaacaaagtgcagatggctatgtcttcgtttattacgaatcgtacgagccgaaggtaaaggttttttcagaagagggaagggtgaaaagtgcttttcccttgccttcaggggtttcctgctgtcttttggacgagaaacaaaacctttgggtgggtttaagtgatgaaggcatttatggtgacgcaaaccccagtggacaaagtgtgctgtgttgtactttagacggacaactaaaggaaactcatattgatccacagcttttagaaatatatgcgcccgtggtagatgcctgctatgcacttgcagaaaaagatggactgatatacatgctgtattactcttatacagtcattgctgcctttgatgagacggacgtgagacgagtgtggattgtttctgataaagaatattctggagtatatgaccagcttgcaatttcagatgacgggttttggatatgcaaagatgaacattcactgtccctcattccggctgatgtcagtctgccgatacaagaggtgaagtgctgtgatcaagacgggagggagctctcgatacaacaggtgaaactgacaagtaatgctatttatgctctatcagattcagggatctataagagggatatcagaggggggaagacaaatgaatgaaacatcgttttggcagcttattgaccaagctggcaatcaggaagaacctaatgagtggctgcgtgatgcattattgaaaaaagaaatcaatgagatcgttgattttgaatttatgcttcagacattcatgcacaaaagctatctgtcctcactatgggcggcagcatacatcttaatggacggttgttcggacgatacatttgattatttccgcggatggctgattgcccagggtaaagagacatttgaaaaagtgctggatgatcacgagtatttggcagcacacatcacggaggaaacgcttgacgaggaaggctatccgcaaaatgaagacttgctgtcaatggcaatcgaagcgttgacatatataaagactggcgacgatgaatgggatgatgaagtacacgacgagcttttagatgcgcttgagcaaaaggggcttgccgaatcggacggtattgaattggattgggaagaagaagatttgcctgataggtttccaaaactgtgggagcgttttggggaaaatccgctgggtgagttttaaatagttgaagataaggcttgtatcaataagcgatacaagctttttcagaacaaatctaaacatgaacgacaacgaaaacaagagaatgatgaatcaatttaaaggaacttgagaaattgacggcggagggaatgcagctcatgcaaaaaagattaatcgaaaaactcgccgagaataaaagacatatgttgatgagcgaaatcaaaaaaaaattagtcccttgtgcagaaagaggcttcacttatcgttttgctgatctgtcgcaaagcaagcaattgcttgagctggttttatcaaattcaataccagccaacacccgtgaggttgatgccctcgaaaaaacggaagcgaaacagttgatctggaaaatatctcagtcatatgttgcttatgatgaccgggacgttctgctgtttcatcaatacagcagcgaaattggtgcgttaatttcttcttttggaaaatgtctcgagcaccttgacggcatattcgaatgtattgggttcgacaaagggcttctcaatcatagttttattttggttgagcctaagggtcagtttggattatgtatattgcacacggaatatggctgtgaggttgtatattggtagattagtttcctgggaggaaacaccattcgaaatcgtttatgggaaaatattcaatacctaaataacagtacggtgctttgcatactaataacaaatcatttagtacttgaatacgtggtgatcaaattgagcgagctaaagctaatagaatgcataaataaaatcaaaagtgtcttaaatggacaaacaacaagagaagaagtgtcggattgggcgggcatttatgtttatgcgtatgaccccgaagtagaagatgatagagtctggaatatgttaatccttctaagtgggattgatttgaaagattctcctgaaacttatttgcattcaacagatgatttaaatgattggatcaaacaatatactgaataatttgtggttggtggtaaggtgttattgattaaaaaagaggcaggagatgacaatgtacaaaacaattaatgaatgggttgattacatagatgaggggtgcagtgtccttcatttagattttaatgtgtttaaaaaagagctctcacttaatataaaggttgttgaaattgaagctgaatatacgcataaaatagtatttcaaaatgtggcatccgcttattatagtgcagatgttggcgacatgagattggaaaaaatagatctggaagaatacaattggcaagtatttgagatgagttatcatccagaaggaatcgggaatctatcaaattctataattccggagtatcaatcaaatgctaactttcttattgacatgaacagaatgctgattgctatagaagctgaaaccgttcgctttgatgatcaatcgttttatgcatatcattcaaatcataaataaatcaacatataagaaaggttatcagccttttacggtttaacaggagccagacaatttgtaaacagcgatagtattacgatttcaaacagcagtactggaaaggaaattttattaaataatcctcatataaaacaaggaggcagcatggccaaaattaaagacgattgtcttgaacttgagctaacaccgagaaggtatcaagaaatggatgatgatccatttattttatccatatttgagttgttggaaaataaaaaagcgatcgttcgcgattattccgctgttttattagagagtgaatataaattgctgatatctggaattgaaacgttgataatgggaaatcaagatatgataaatttagaaaccattgatccacttttaattctcagtattaatgaagaaaacggaaattacagctttaagattaaaattatacttgaaggtgatgttaagtttaattctaatttgtttgagattacctgtaatgaaaaaaagctagaatcctttgcagatgctttaaaaacaaatctggaagatgtaaaaaaatcttcaaaacttccctaaccgttacgcggaatttatcgaaataataatctgatgttatatccagaggggcattagatagggtcaaggactagctgatgtccctcttacactgcttacaaggaagagtgaaaaatgaatgaaaaagaacttgagatgtcattaaagttagatcctgataaaagatatcgttattttattaagaaagttgttgactatgaagaagtctggtcattaagtaacgacgagggatgggttatatctgaaggcgagaacggtatactgcacctgcatttttgggcgacaaaagaacatgcaaatcattgtgctattaagaaatggaaggacacaagtccagaatcaatttccttggatgattttgtggaaaattggctccctggaatgcttgaagatggagtcggtatatcaatattttctaacaatcgtaattcagtttcaaaaccaatacctctggttcttgaagatattgaagaagaattacaaaactattcctgaaaaagtattttaatttgtctaaagtatcccatctgcatgttaaaccttttacttaaaatgaagtgaggagtatgacatgaacagtattgagcaatggatagattatataaatcacgatgttaattgctttatgtacgatattaattttgaatacctagagaatagattaactctttatcttaagttatatgaagaagaagaaaaagccactttaaaagaaatttcatttaaggatataagtggaatttattgcgattttagtgttcataacaagtttgataaaactatacccattgatactaattggtaccttgaagaaatcagttatttcaaagaaggaattggaaaactacaaaatggtatattaggtaatcaagtcttaaatgctaattttcttatagaaattaacgggactttacttgctatagaatctaaatgtgtatcctttgattctaaagaatatcaagcgtttaatgattatgaaaaaactgaaaaaaaaacaaaaaaataatatagtggctgggatcaagaaattttttcaaggaggcaggatttaagtgaataatccaatacaaaagcatctgattgattcggaattcaccatattaaaaacagattttcagttctttaaaaaagaatttattctttatttagaaatggatacgaagggaaagaagcagcagcatcgtattttattcaagaatgtatcatcattatttttttatgccggcaaggaatcgtctttaaaagatgttgcttatggggaaaaatggattttgaattcattctcttactatccgaagggtattggaacattatatcaccctttaattgaagattatgaatcgaatgcaaacgttttgattggaattaatcaagctgtctatgcagttgaaactgaaagggttttctttgattcaactgaaatatatgcctcaacatagaggtgatcgtaataatgaagtaaataaacgagtaagaggacttatctcaccatttcaaacctaggagcataacaaatgaaaaaattaaaaatgaataaaattatcaacatggacacccaagattgttttttccatgctgatccactggggcgtgtctacattggaaaaggtgtgaaaggtgatgtgaccatctcaatctatgatccttccggtgatattcgggtttttaaagtgaaagagcagatttcatacagtgatatcctgctctttcaacaatgtgcagatggctatgtcttcgtttattacgaatcgtacgagccgaaggtaaaggttttttcagaagagggaagggtgaaaagtgcttttcacttgccttcaggggtttcctgctgtcttttggatgagaaacaaaacctttgggtcggtttaaatgatgaaggcatttatgatgatgaaaatcccaacggccatagtgtgtggtgttttacgttagatggtcagcagaaggaaatacacattgatagaaagctcgaagaaatggatgcgccggctgtagatgattgttatggacttgcagaaaaaaacggcttgatttatatgctgtattacggagatgcagtcattgccgcgtttgacgacacggtcgtgagacgggtatggattctgtcggataaagagccgaactcagaagcattttatcagcttgcgatatctgaagaaggttttttggttgggacgttcaattgttacagtgaagagcttgagtcgtctctttatttgatttctgccgatgtgagtcaagagatggaagagataacatgctgtgactcgaacggtgaagccctagacgttcaacagctgaaactgacgagtaacgctgtttacgcagtgacctcttctggtgtttataagcaggatatccaataaggtgtagggatgagatcatgatgaattggcgcgctttaagtcagacaaaacaagaccgcatctggtcagaagtgaacaagctcataaaatggaaacccggaagcagatgtcatcacatcatcccgcctgatccatatcgagtgtttgatatttcaagcgggatgagcggtaaagccagtaatgatgatgtggtcagagtgctgaatgatttagagacttcgattttaaaagcatttcaatcatgtactggaaaacacgatgtgatgtacgcattagactggcagcatgacggatatatttttagccctcatcagacaatgcctcaggatgaatttggcgaatggcctgttcccgtatttccaaatggagactattatttcttttttcatcaggacttctcctggggacttttgggagacccgtggaaattgacaatcactgtgttgggtgaagagctgttggaggcgatagatcatgatccgcctatcctgtttcaaaatagatgagtgttctgaaaaacggaggtgaaacatgggcttttgggaagaaaaatataaaaataaaaagatattcgtaagtgatgatggtttggatatttgtcacgacgccatcgaagattttcatgctgtgttcctggaacaattggatcgcaagcctactctaaatgaatttgtttatactctctttcaggtattaaaatcagacggcgattcgctttttaaagaattagaaggaaaacaagtcactgacatcaacctaaagatgaaaaaaagaactactttaagtgaagttaggcctggtgtggtcattgaaattcctttacggcaaatcaatcagtttacatatgcattagtggtaaaaggagatttagcaacagataaaaatgatgatcttctcattcagtattttgatatttttacagatcaacgcttgagtaaaaaagacatttctctcatgatggcagaaaagcaaagaaccctttttattgcgaatacaggatatacaggctttcttcaggggaattggaaggttgtttccaaggtgccgatagatttgatgaaaaaatttgatcattctgctataacatttgtcatgtatgaagatggaaaatacctcattagccaagacgattcattagcggcagagagtgatttaatagaggttgatgaaaaacgggggaagacctttagcaacccgattgggctatttggtcaccttagtattgaggatattctttatcaatatttcaagggaacctcgatggaggaattgattaagtatgagttgtaagaagggcttttattagggggaggttgaggcacatatgagcaggtattgtctggaatgtgcaaattctgaactttttctcttaaatgattttttcaaacaattccccctacgtatcactgagtatcattgggtcattggcgatattttaaatatgatggatgtatcctcggataaggatcattggaacgatatcattggcgagcgtgaagactatctttttatcacaggtgaggaatttcatcgtatattaaatgaatatgagatttatgtgatattttctattttaactgctgtgcctaaagagacgatactgtatgatataacacaagttccgtttgttgatgggaatgctgacttttatgaagatgattatatctcccctgtgaaagaatgtattttcgaagtcggtttctttgattcaacagatattatatttacagtgaccgatgaaaacatagaaagaatgttgaaggattcttttcctgacttgaagccttactgtgagtatggagtatagggaagccatcaacggaggaatcgaaattggcagatgagtcgagtatttcaggagctactcctattttgtttcaacatatcaagaaatggcgtttttatcgggaaacagatcacgttcttggtatcatttatacgattgagttagcagctgtttatcattcacgtacgattgttgtcatattcaaagacgtttcagtcgttacgatacgagaaatcgaaaccctatcgaatctatcagatggacttctccatattgaaatgcaaccacaaggcacgtaccttgtggaagaatgggaagagcagacattccgcttttattgccggcaatatgaggtgatggaagttgaatagggtgaggagaggatcaacgtgcttcaaaaactgagaaaaagacagcaagagcttgaagaaacgccgtatcctgatgaattgtacggctttgaagcggaaatctatgagttttttatgctagttgatggcagtttggattatgtactggcgaataaaaggatgtccgggcatcagcggcgttcgttggagaaaagcttttttgagctgtatcgtgacatacttccggatatgatcaaaaacgataaagatctgtatcatcacattctcttgtatgaacaagtcagacaagagatttgcgttgcgctatccaactgataagggggaaggttttatgggaaaaacctctataagcagtatcggcaatttggacatggttgatcttaaacctgaccaaatcgttacgtcatgcgaacttaaagatgcagagtcgttttatcgtttttggcaagggcttacctgtgagcgaatcatgatacaggtgataacgactggttcatttatagaagacctgtcagagtttgtcaaaggctatgcttacaaggtgacgaagctggcgaaaaggcaatttcatttccaatgcgtagtacatgaagcagaccgggacattgcagattttctctttctgttagcttccatcaatgatgatgtttttctgaccactgaccctcaaccggataaaaactatttttccgaaggcaaactccaatgcctgacggactcaggtgaacggatcatgtggtttgaatacgatgctgtagacatctatatggttggcgggtaactaaaaataggaggaattcatttgaatatcacacaatacgagaaaatgaaaaaacatctttctgatgcggatacaggtccatttacattaaacgagttttctttctatatgaaagaagatgatcgttatattcaaattcctgtgtttgaattaaaactatcagctcaaacctgtgacattcatttgcggtttgaagacattagtgcatcaaagctggatgaccttgaatccatcgatgcggttgagttggagattgaaccgactgacgatcaatgggaaagactccgttattatgtgtatgatccagaagatcagatgagtttctattgcggaggatgggatgtgatcaagtgtgacaagaagtcacactgattttccccactttccaagcgttcttgcttttgttgccgcatatgtcacgagaaacgggatagtcacaatcagaaaaaacaaaggcacccaatttgataatccggttacataatggagtgtaatggacaagagagtcaggaaactcaaggtgcaggtgacgtttcgaacgtctttttcgcttcttttatatttctctctcatggtagattgatcactgtatatcggtgaagtcccgggctcagccgaaaagatatgcataccttgtgaagagcaaacacgctcccatccggccgcttcaaacatctcagtgtattccgccaaactttcttcctcaatatcatgataatcaatactgtagatcaatttctgcggctcagcttttctaagcttataccccataaccgcaaatgaatcgagcaaccagcctttgctggccatatcactgagtttcttcatatctttttcttctgaaaaagccaagccttcggacatcatatattttttctgtttcatgatgaatcccctttcaattgctgaaaagcgcgttcgccgtgttcagccatcacttttctgcgctgaatttcttttttgagtagttcttggccgtgcaaggtagtttggtacactttgcggcgcggattgtcattgttgactagctcaatgatctcttcttgcagtaatttctttaacaatgtatataaggtagccggaccgatcgtaaaggagtcatcggtcatgtcctcaatctcctgcatgatcgaatatccgtgttttggctccagcaaggttaagacaatataataggctggatcggtaagctgatccatttcctgcggacgctgctttggcaagcggtcacctcatttcttatatcaactaatgatatatcacttattgatataataaaatcttcctttttgtttgtcaacgcaatttttttctgaatccagtcatcataaagaaacaatcaccgagtatgcattaatgtattcgttttcatagagggggagtcttgatgaaaaaatggatggcagcggtttttgtcatgatgctgatgttgtgttttggcgggattgagaatgtgaaggcggcggagacgaaggtgtatcagtttgactttggaagcggttcagtggagcctgattatattggcgtcagggcgtctgatcggtatgaccgctcaaagggctacggttttcaaacaccggagaatatgaaggatgtggcggcatccgggactggtgtgaaaagggatgcggttcagtttttagcgtatgggacgaaaagcaataacacgtttaatgtggatctcccgaatggcctttatgaggtgaaggtgacgcttggtaatacggcaagggccagtgtggcggcggagggcgtgtttcaggttattaatatgacaggggatggcgcggaggatacgttccaaattcctgtcaccgacgggcagctgaatctgctggtgacagaggggaaagctggcaccgcttttacgcttagcgctttgaaaataaagaaattgtctgatcagccggtgacgaaccgaaccatttatgtcggcggcgactcgacggtgtgcaattattatccgctcaacagcagcaagcaggcgggctgggggcagatgctgcctcactatatcgataaacatacctttcaagtgagaaacatggcgtctggcgggcagatcgcgagagggttcagaaatgatggacagcttgaggcgatcctgaagtacatcaagccgggggattattttatattgcagcttggcattaatgacacaaatccgaagcataatgaatctgaagcggaatttaaagagatgatgcgtgatatgattcgtcaggtaaaagcgaaaggagcggacgtcatcctatcaacgcctcagggccgggcaaccgattttacttctgaaggcatccattcgtctgtaaacagatggtacagggcctctattttggctttggccgaagaggaaaaaacatatctcattgacttaaatgtcctcagctcggcatactttacatcgatcggtccggaaagaacactcgggctttatatggatggagatacgctgcacccgaatcgcgcgggggccgacgcactggcgcgattggctgttcaggagctaaaacgccagggaatcgctggcttttaatacatcatttttcgacaaaacacatatgccttggtcaattagagtataatgagaacatctgcaagagacaggagtttatacatgagtcattttaaaaactatcaaatcagtcatgacattttacgagcattggaaggactgggatatacagaaccgaccaaggtgcagcagagtgtgatccccgctgcccttgaacgaaaggatcttgtcgtcaaatcacagacaggaagcgggaaaacggcttcgttcgggattcctctctgtgagctggcgaattgggatgaaaacaagccgcaggcgcttattttaacaccgacccgtgagcttgcggtgcaagtaaaggaagatatcacgaacatcggacgatttaaacggatcaaagcgacagccgtatttggaaaatcctcctttgataaacaaaaagctgagcttaagcaaaaaagccacattgttgtcggcacgccgggacgtgttctggatcatatcgaaaaaggcacgcttccgttagaccgtctctcctatttggtcattgatgaagcggatgagatgctgaatatgggcttcatcgagcaggtggaggcgattatcaagcatctgccgactgagcgcacgacgatgctgttttcggcgacacttccgcaggatatcgagaagctgagccgtcaatatatgcaaaaaccggagcatatcgaaatcaaagcggccgggcttaccacaagaaatattgaacatgcggtgattcaagtaagagaagagaataaattttcattgctgaaagatgtgctgatgacggagaatcctgacagctgcatcattttctgccgaacgaaggagcacgtcaatcagctgaccgatgaattggatgacttaggatatccatgcgataaaattcacggcggaatgattcaggaagaccgattcgacgtcatgaatgaatttaaacgtggcgagtaccgttacttagtggcgacggatgtcgccgcgcgcgggattgatattgaaaatatctcccttgtcatcaactatgatctgccgcttgaaaaagaaagctatgtccaccgcacgggccgaacgggacgcgcagggaacaaagggaaggccatttcgtttgtcacggcctttgaaaaacggtttttagccgacattgaagaatatatcggatttgaaattcaaaaaatagaagcaccttctcaagaggaagtagcaaggaaaaaacctgaatttctagctaaaatgaatgaccgtccggaaagcaaaaaagacaaaagcgaagagctgaataaagacattatgaagctgtattttaacggcggaaagaaaaagaaaatcagagccgttgattttgtaggaacgattgccaaaattgacggtgtgtcagctgacgacatcggcatcattacgatcatggataacgcctcatacgtttagattttaaatggtaaaggccctcatgttctcaaagtgatgaagaacacaaccgtcaaagggaaacagctgaaggtgaataaagcgaataaatgatgaatgacctgctcccagttaaaggggcaggtcattttgctgctggctgacattggcgctggtctcctccggaacaaaggcaagaatcacaataccaattacaaacaaaatgatcagactgaacacggcagtcgaggatttcccggtcagctgggcggtaacggcaatgagcagcggccccataattgaggcgaattttccaaaaatgttgtaaaaaccgaagaattcattagcgtggcgctttggcacaagcttggcgaaataggaacggcttagggcttgaatgccgccctgcgaggtggcgacaagcatagccagtatccagaaatcaatcgttgtcttcataaaataggcatacacgcagacgatcatataaatgacgatcccgacgtacagcatggtcttccccgtgaagcgttctgccagttttccgtatacaatcgaaaacggtgcagcgaccacctgggtgacaaataggatgatcaggaggcttgaggaaccgatccctaaatctgatccataggatgtcgacatcgtaataatcgtgccgactccgtcgatataaaagaaataagcgagcaaaaagaggaaaagtgcccggtattgcctgatccgtttcatcgtctggccgagccgcttaaagctgttgatgacaatatgaggttctcttttgatgtaatagcgttgatggacatgtttaatcattgggatggagaacagcccccaccaggcagccgttatgaaaaaggacagctggcttgcggccgatacagacactggaatcgtctctgcttgtgcgagcaggatgacagcaatactgatgataaatggaatcgtgctgccaatgtatcctaagccaaaaccccgtgccgagacgagattcatccgcttctcaggcgtgacgtcaacgagaaaggcatcataaaacacattggcgccggaaaaaccgatagccgatatcgtataaaacagcaacaatagcagccaatgttcactagggataaaggcgagcatcgcggtgctggcgacaccgactgacacaaagaaaccgaagaactttttcttgcacccttcatagtcggcgattgtgcctaaaatagggccgagcatcgcaagaataaacgttgaaatcgcaatggtatagcccagataggcagtcgattgagcggcgctgacaccgctttccgcagctgctgatttataaaataacggaaataccgcggtggtcacgacaattgagtaagcagaatttgcccagtcatataatacccagctgttttcttgtttcgtaaaacgtttcatcatcagagccccctctccggtaacgatacttctattgtacgaaaaatgggcctgaaaagaatggaatgcacgtcaatttttacaaaatatttatgtttttgcgcttcaaatcatacttttgatttattgctggggttaggtgaatctggtaccatttaactatattttatggtattttccagaagggattcagcagagaggagacagagcatgaggcgaataggcttgtgtataagcctgctggtcacagttcttgtgatgagcgcatgcgaaagtgaaggtgaggctcagatgttcgcagactgtgatcaaaagacggtaaaacaaaccgcagccaaaccgatgagcagtaagaaaaagcaggatttccaagccctcgcaagcgacaggcagctggccattgtgttcagttccatgatacaagtgagcgaagcatttgattatggaatcggcaatccagaatacttcgtgcgaatcagcatgactgaagaagaagcagacattgcgaaggagaatctcgaatcgattaagcttgagaacaaatcgctcaaaaaacaaaacagcgaggcggttgccttgctacaaaaaacgcgtaatcaagacatgagccgcatcgaaattcagcagctgacagaaaatagagccgctttttttgaggccgcagacagtatgatcaaactcatcggccaagtcacaccgaaaaacgcgaagaagacaagacagcagctggatcagctgaaaaaacaatatacacaatacagcgctgaaagcattaaaatcatgaacagcattgtcaaaaagcagaaagctgacaaggcatcatttgaacgccatctggaggcgctgcttcaaaaacagccggggcagcaggtacggagtgaattgtactgaccagcttccgtctttccctgatgatattgacctagtacaaaaagaatgtacaatcaagatatagtctgttcttagttgattggagggacatgccatgaaaattgcgaaggtgatcaacaataatgtgatcagcgtggtcaatgaacaggggaaagaattggtcgtcatgggcagggggctcgcgtttcagaaaaagtccggcgatgatgtcgatgaagcccgcattgagaaagtgttcacgctcgataacaaggatgtatcagaaaagttcaaaacccttttgtatgatataccgatcgagtgtatggaagtatccgaagagattatcagctacgcaaaattacagctcggcaaaaagctcaacgacagcatctatgtgtcgctgaccgaccatattaactttgccatccagcgcaaccagaaagggcttgatatcaaaaacgccttgctgtgggaaacaaaacggctgtacaaagacgaatttgcgatcggcaaagaagcgttggttatggtaaaaaacaagacaggtgtgtctctgccagaggatgaagcaggctttattgctctgcatattgtaaatgccgagctgaatgaagagatgcccaatattatcaacattacaaaagtcatgcaagagattttgagtattgtaaaataccattttaagattgaattcaacgaagaatcgcttcactattatcggttcgtcacccacttaaaatttttcgcgcaacgtctatttaacggcactcacatggaaagccaggacgattttttgctggatacagtgaaagaaaagtatcatcgcgcgtatgaatgcacgaagaaaatccaaacctacattgagcgggagtatgagcacaagctcacaagtgacgagctgctgtatttaaccattcacatagaaagggtagttaaacaagcataatgagagcgctgacatttgtgtttccttgtgttcactttttcttacattcacatatgaaaatggcaggattgttactgataaagcaggcaaaacctaaattacaatgagtgcggatcatctctgtctgtgctgatggtaatttaggtttttatttttttcagagggaagatgatgatagttacaggattcaagtcagtaagattcgatattatcattattttgaccgatgttcccttttagaagaatcatgtaagatcaacatagaaaacgctttcgatgaaaggggaatgccaatatgccttatctgaaacgagtgttgctgcttcttgtcactggattgtttatgagtttgtttgcagtcacttctactgcctcggctcaaacaggtggatcgttttttgacccttttaacggctataactccggtttttggcaaaaagcagatggttattcgaatggaaatatgttcaactgcacgtggcgggctaataacgtatccatgacgtcattgggtgaaatgcgtttagcgctaacaagcccatcttataacaagtttgactgcggggaaaaccgttctgttcaaacatatggctatggactttatgaagtcagaatgaaaccagctaaaaacacagggatcgtttcatcgttcttcacttacacaggtccaacagatggaactccttgggatgagattgatatcgaatttttaggaaaagacacaacgaaggttcaatttaactattatacaaatggtgcaggaaaccatgagaagattgttgatctcgggtttgatgcagccaatgcctatcatacgtatgcattcgattggcagcaaaactctattaaatggtatgtcgacgggcaattaaaacatactgcaacaaaccaaattccgacaacacctggaaagatcatgatgaacttgtggaatggcacgggtgtcgatgaatggcttggctcctacaatggtgtaaatccgctatacgctcattatgactgggtgcgctatacaaaaaaataatgccaaatgtgaaagagcctgctgcaatatagcaggctcttatgattgtaatgagaagttgttggcgtgaatcttctattcactcataatatcctatttgatcttctcccctctgtaaatcacgtactcactcaatgctacgatcaagctcatacatttagaaagaaataatcccaatcaaaagtgcggcaatcgtcatcacaatcgttgttcctacggcccatttaatagtgaatttttgatggtcgccaaagctgacgcctgccattcctaccaatagataggtggaaggcacaagcgggctgagcagatgcacaggctgccccagcaaggaggcccttccgatttcagcggcgtctattccgtaagcggaagcggcttcggcgatgatgggaaggacaccgaagtaaaaggcgtcattcgacatgaaaaaggtgaagggcatgctgacgatcgcagtgatcaacggcaggtgcgggcccatggcatcagggatgagtgaaacgagagaatgcgccatggcatccaccatttttgtgccggagagaatgcctgtgaatatgcccgcagcaaacaccatcgagacaacgtttaacgcattacccgcatgcgccgagattcgtttctgctgctctttgacatttggatagttaaccatcaaggcaacggcgaacgcagtcataaaaagaacaggaagcggcagcaggctggtgatcagtgcggccatcagagcgacagtcagcagcaggttaaaccattgaagagcgggacgcttgagcggtgcggcctccggatcggaagacggtgcgtgatcaatcgaaatgacgccgagccgcttccgctctttctttccgaggatataagcaacggcgatcacccagagaatgccggcgatcatagcgggaatcagcggcgtgaaaacctctgacgtgtccaattttaaggaggccaaaaccctcgcagtcggcccgccccacgggataatattcataacccccgaaccgagcatcgctattcccgctaacaccaaacggttcatgccgagccgtttgtagagaggcagcattgctgcaatggtaatcatataggttgttgtcccatctccgtccagcgaaatggtcatggtcagaaccgctgtgcctacggcgatttttaacggatctcctttgacaaacgataagattttggcaatgagaggatcaaacaggcctgagtcaatcataatgccgaaatacaggatggcgaataacagcatgataccggtaggggcgaggtctgtaacgccctgaatcatcatctcgccgagatctttgccaaatccgctgatcagggcgaacacaataggaacgacaatcaaagcaataagagcggaaagccggttagacataataaggtacataaagacaatcatcatcacaaaaccgagtatggcaagcatgatatgacctcccctattcaacagcttttttagtaagcgcttccatcctttctttctgtgaagaaggcttatttcaaatgtgtatgaccgcatatttatatgtagaccaaaaatcctaatgagcggattagcagtttatatgaagaacgccacgggtaaatgtgctgtagaatgtttcgttttaaaaagggggagcagacatgagtgatgaccaaaacaaacgtgtaaatgaacactcaaaggacgagcagcttgagcagtacaggaccgataacagcgggaagaaaatgacgacaaaccaaggcttgcgagtgtcagaggatgagcattcgttaaaagccggggttcgcggtccgacgctgatggaggattttcactttcgggagaaaatgacgcactttgaccatgagaggattccggagcgcgttgtgcatgcgcgcgggtatggcgtgcatggcttttttcaggtttacgaaccaatgacggaatatacacgggccaaatttcttcaggacccttcggtgaagacaccggtatttgtccgtttttctacggtcgcgggttctaaaggctccgcagacacggtgcgggatgccagaggctttgcgacaaaattttatactgaagaaggaaactatgaccttgtgggaaataacattccggtgtttttcattcaggatgcgatcaaatttccggatttggttcatgcgtttaagcctgagccacacaatgaaatgcctcaggccgcgactgctcacgatacgttttgggattttgtcgccaataaccctgagtcggctcacatggtgatgtggacgatgtcagacagaggcatcccgcgcagctacagaatgatggaaggcttcggcgttcacacgttccgttttgtcaatgaacaaggaaaggcacgtttcgtgaaatttcactggaagccggtgctcggcgtgcattctctcgtatgggatgaagcgcaaaaaattgccgggaaagatccagatttccaccgccgtgacctgtgggaaacaattgaaaacggcggcaaggttgaatacgagctcggcgtgcagatgattgatgaggaagatgaattcaagtttgattttgatattcttgacccaactaagctgtggccggaagagcttgtgccggtgaagatcattggaaaaatgacgctgaaccgcaatcaggataatgtgtttgcggaaacagaacaagtcgcattccacccgggaaatgtcgtgccgggcatcgattttaccaatgacccgctattgcaggggcggcttttctcttatacggatacacagctcatccgtcttggcggcccgaacttccatgagattccgattaaccggccggtctgtccattccataacaaccaatacgacggctatcaccggatgacgatcaataagggacctgtcgcttatcataaaaactcactgcaaaacaatgatccgtcgcctgcgacagctgaagaaggcggctacgtccactatcaggaaaaagtcgagggcaaaaaaatccgccagcgaagcgacagcttcaacgattattactcacaggcgaagcttttctggaacagcatgtctcctgtggagaaacagcacatcatttctgctttctgcttcgaggtcgggaaggtcaaaagcaaagacgtacagcggcaggtcgttgatgtcttcagcaatgtcgatgcagatttagcagaagaaatcgccaaaggagtaggcgtggcggcgcccgcgaagcgtaaagcatctaaagaaattcttacttcgcctgcgttaagccaagcccgtacagtgaaaaccgcgtcaacaagaaaagtcgctgtactcgccggaaacggatttcatgaaaaagagctgcaaacagtgctggaagccttaaagcaagaaggagtcacagtagatatcatcagtcaaaatctggggtatatgacaagcggcagcggacagcagcttgaggccagcggcacgttcctgacggttgattctgttctgtatgatgccgtctatgccgcaggagggctggagttaaaagacaacaaacaagcgatggcgtttatcagagaagcttacaatcactacaaggcgatcggtgcggcaaatgaaggaattgaccttcttcaatcctctgtcgggacaacagagggaccaggcatcgtaacggctaaagaagaacctgactacaccgcattcagcaaggcatttatcgatgcggttgccgctcatcgccattgggatagacgaatttgatcggctcctgtatctttaaggaagatacttttcataaggagcatgacaaatgaacgaaaaacagctcgctgaagcttacgaacgcgatgaaaatatgatgattttggtgtttgcccaatggtgcgtgaaccatgatcttgatccgatggagctgtacgccaaagcgtatccgcagcaaaagctgaatgaaagcttgaaaaaaaccatggacgatcttgtcgtgccaaaacacgaagcagagcacattccggaccagactgtcattgcggtattagagatgttcggaaatacagatttggcacaggccgttcatgaagcgatttctgggcgcaaacagtaaaaaaagagacatcctgtgtctctttttttattggaaaaatcatgctgttagacctagaaacttctttcaatttaatcagtctataaaagtgtgtattgcttaaataagagaatgttaaacaacgacatcaaaggaggagatcgtatgaaatggaataacatgctgaaagcagcggggattgcagtcttgcttttttccatagttgcatatgcggccccatctctaaaagcagttcaaacgaaaacaccgactgtcagcacccatacgtacaaaaagatcaaggagttaacgtatccacaagtgcatcacgtcgggaatgccgcgtttgaaaagaaaatcaatcaagagctgaaagcctacattgaacaatcgtatcaggaatacctgaaaaacaaaaaagcaggcgaacagcagggctttaaaacggaatatcaaacatccttcagcgtcaaatacaatgcggcaggcaagctcagcattcaaacactcaattatatctattcagggggcgcccacggtctaacgtctgtccagtccttcaactatgacttgaaagcacaaaagcgggtgacgctggatcagattctgaacaccaaaacaaaagtcagcaaaacgagagattatctatatagctatatcaaaaaacacgatgagctgtttttccctgatgttaagaaagaggatataaccctaaacaaagacacaatgttttactttacggcaaacgggatcgccatcgtctttggccagtatgacttggggccttatgcagcgggaatccggaatgtgcaggtgccagcctctatttatcaataatgaaaagagccatatccgaaaagggatatggctcaatgtttctaccacacaaacaggccgacaatcgcagcacttaataaagataccgcaattccgctgacgagcagcttccacacgtttttcccgatgaccgttgacttttctccgtcaaggatcgaattgtacgtgccgtaaatcatgccgacagtactgaagtttgcaaaggacgtcaggaatgtcgtcgccaccgcaacggtgtgaggcggaagggatttgagattgtttttcaagtcaagcatcgcaacaaactcgttcgttgctaatttcatgcccatcagctgagcaacatacatcgcatcgtgcactggcaatccaagcaggaatgcgaacggactgaacaggtaagcaaaaatcgtctggatggtcaggccgtgtacgaaaacgccaagaatgccattaactgctgacgttaatgcgacatatccgatcaccattgccaaaataacgataaccatgttcatgccgacaagcatactgttagaaatcgtagagaaaaagtctttcttctcttctttaggcggtgtatagatgatatcttcatcctccggcacgtgaacaggattcagcaggtttgcgataatcagcgcgtttaagcagttcaaaggaatcgctgtaaacacgtatgtcgcaggcaccattgacagataagatccgataatggagccgctgatgctgctcatgctcattaagccgaatgtgagcaggcggttgttgcttaaaaccgttagctgctggcggataaccgcaagtgcttcggtatttcccaggaacatcatttgaatagagaaaaagctttctaatttcggcaagcgggaagccttagaaatcacccatccgattttatcaatcagccaaggcaaaatgccgaaatacgttaaaatatcaaagaatgtgacgataaagataattggaagaagcgcactaaagaaaaagtctactgtttcattcgccatcactgacggaaaggcaaacgcgataccgtcactggcgcaagcaatcagccaagtgaagaaatcaccgattttaccgatggcccagcttccgacttttgttcccagcataaaccaagtaatcagcaattccagaacaattaacgtcatgatcgggcgccacttgattttctttttctgcggagaacataggaatacaactgccataatcacaatgagaccgacaaggtttagtaaaaaatacatgatagcaactcctatgagggttattatggaaacaaaaaaagctcttattcttcacaaattctggaagtgcagaaagtgtgaaaaataagagcaaacagaaaagaacttgtccttttcaactcgttcaaatttattcaaactttcttgtagtctagttttttacggttactaggtagaaacaatcagaccatattactgatcatatacaagaatgtctttttctaagatgatagcagtattttatcctttcactttttgaaaatcaacctttttaactattttcacaataataaaatttatattctaaaatgagaaaataaaggaaaaacatgctggattgctatgctgatatgatgttggcgggataccagcatgtcagtactgatttttcttcactataagattccagctcctggagatttgttgtatgatggaaacggggaaacccatacagcagaaagggagtttttttcatgattatccaattcattcgttatagataatgacaggtgtagacaaactgccagacctggccaatttttgagataggcctaggtttatttgtctatgcctttttcatttatctaaaaatgaatgaatgaggtgttttttatcatgaagcaaacagttgacttcagcatgtttcgatgcccgctctgcgattcttctatggatgcggcatcagggaaaagcttgatttgtacagaacgaagacatacatttgatctatctcggcacggctacgtgaactttctgacgaagccggtcaaaaccagttacagtgccgagctttttgaagcgaggagcaggctgattggagaatgtggtttttttgacccgctccatgatgcgattgcagaactcatcagtcatcccaaatctggtcatgaggcattcaccatcctggacagcggttgcggtgagggttctcatttgaatgcgctttgcgggtttgattatgcagggaaagcagcgataggaaccggcatagatctttcgaaggatgggatcttaaaagcttctaaggcattcaaagatcagatgtgggcggttgccgatgtggcgcgtgctccttttcatgatcgccaatttgatgttgtgctgtctattttttcgccgtccaattatgcagagtttcatagactgctgaagaatgatggcatgctcgtaaaagtagtgccgcgaagcgactatttaatagaattaaggcaatttttatatactgattcaccaaggcgcacgtattccaatgcggcagctgttgagcgttttacagcaaatgcagcacacagccgtcctgtcaggctgcgctatgttaaaacgcttgaccagcaggcgatccactggcttctcaagatgacgccgcttgcctggtcggcgccgaaagatcgagtcagcctcctgaaagagatgaaatcagccgatattacggttgatgttgatatcctaataggaatgaaatgaatggcagaggaaagctccgaaaaaaggagctttccttttttaatcggaatagttggcccacgcttctcgtacatatggaaaggggacggaaacagccgatgcggacaggtttatgtaaacgctttctagttcgcagaaacgggggatgtgtgtggaactgatcatcattctattggcgttaggtttgctgatgtttacggcgtatcggggattttctgtcatattgtttgcgccgatttgcgcgttattcgcggtgctgctgacagatccaagccatgtgcttccttttttttcatcaatttttatggagaagatggcgggttttattaagctgtatttcccagtgtttttgctcggtgctatttttggaaaggtcgttgaaatggccgggcttgcggcatcaatcgcgaaaacaattgtccggcttgtcggggcaaaaagagcgatacttgccattgtgctgatgggtgctgtcttgacgtacagcggtgtcagcctgtttgttgtcgtatttgctgtatatccttttgcgaaaaacatgttccaagaagcaaacataccaaaacgcctcatcccgggtacgattgctttaggagcttttacgtttacgatggacgcacttccgggaacgccgcaaatccaaaatgtcatcccgacgtcgtttttcaaaacagacatttatgccgccccttggctgggtttgatgggcgcagtgattgtgctggcagctgggatgctctatttggaatcaaggcggaagaaagcgcaggcatctggcgaaggctatggcggttttgattcgcagaatgctcctgctcctgaatcgattgagtccgcggctgaaccggacaaaagcccgattcggcacgcgcttgcctttgtcccgcttattctcgtcggtgcagtgaataaatatttcaccatttacctgccaaagtggtatccgaatggatttgatttttcttccataggattaaaggagttcggcaggcttgatatttcttcagcggctgctatttggtcggtggagattgctttagtgattggcatcatcacaacgatattatttgattggagaagtgtgtttgcccaattgaaggaagggctgaatgaaggaattggcggcgccttgctggcatctatgaatacgggtgctgagtacgggttcggcggcattatcgccgcgctgccggggtttcataagctgagcagcggaatttcacatacttttaccgatccgcttgtaaatggcgccgttacgacaactgcgctggcgggaatcaccggctcggcttcgggaggaatgggcattgcgttaagcgcgatgtcagaacaatacttacaggcgattcaggcttacaatattccgccagaggtgatgcatcgggtcatttcaatggcatcaggcgggatggatacactgccgcataatggcgccgttatcacgcttctggccgtgacgggtttgacccaccggcaatcctatcgcgatatttttgcgatcacgctcattaaaacggctgccgtatttgctgtgatcgcgatttacagcctgactggtctagtgtagaagaaaacgaaaggggcatcaatatgggaaaagtgctgtcatcaagcaaggaagctgcgaaactgattcatgatggggatacgctgatcgcgggagggtttgggctgtgcggcatccctgaacagctcattttgtctataagagatcagggagtaaaggatttaaccgttgtcagcaataactgcggagtcgatgactgggggcttggtttgcttctggctaacaagcaaatcaagaaaatgatcgcttcctatgtcggtgaaaataaaatttttgagcggcagtttttaagcggagagcttgaggtagagcttgttccccaaggaacgctcgctgagagaattcgtgcaggcggtgcaggcataccgggattttatacggcgacaggcgtcggcacctccatagccgagggaaaagaacataaaacattcggcggccggacttatgtgctggagcgaggcattaccggcgatgtggcgatcgtcaaagcgtggaaagcggacaccatgggcaatttgatttttaggaaaacggcgagaaatttcaatcccattgccgccatggcaggcaagatcacgattgccgaggcggaagaaatcgtggaagcaggagagctcgatccagatcacatccatacgccgggaatttacgtacagcatgtcgtgcttggcgcgagccaagaaaaacggattgaaaaacgaacagttcagcaagcatcgggaaagggtgaggccaagtgaaggaagcgagaaaacgaatggtcaaacgggctgtacaagaaatcaaggacggcatgaatgtgaatctcgggattggaatgccgacgcttgtcgcaaatgagatacccgatggcgttcacgtcatgcttcagtcggaaaacggcttgctcggaattggcccctatcctctggaaggaacggaagacgcggatttgatcaatgcgggaaaggaaacgatcactgaagtgacaggcgcctcttattttgacagcgctgagtcattcgcgatgataagaggcgggcatatcgatttagctattctcggcggaatggaggtttcggagcagggggatttggccaattggatgatcccgggcaaaatggtaaaagggatgggcggcgccatggatctcgtcaacggggcgaaacgaatcgttgtcatcatggagcacgtcaataagcatgatgaatcaaaggtgaaaaaaacatgctcccttccgctgacaggccagaaagtcgtacacaggctgattacggatttggctgtatttgattttgtgaacggccgcatgacactgacggagcttcaggatggtgtcacaattgaagaggtttatgaaaaaacagaagctgatttcgctgtaagccagtctgtactcaattcttaatgggaaggtgtttgacatgagaaaacaagtcgctttggtgacaggggctgccggcggaatcggattcgaaatcgcaagagaattcgcccgggaaggtgccagcgtcatcgtttcagacctccgtccggaagcatgtgaaaaagcagcctccaagcttgcagaagaaggctttgacgcggcggccattccgtatgatgtgacaaaggaagcgcaagttgctgatacggtgaacgtcatccaaaaacaatacggccgcttggatattctggtgaacaatgccggtattcagcacgtcgctccgattgaagagtttccgacagacacctttgaacagctgatcaaggtcatgctgacggctccctttattgcaatgaagcatgtttttccgatcatgaaaaaacagcagtttggcagaatcattaatattgcgtctgttaatggattagtgggctttgcagggaaatccgcttataatagcgccaagcacggcgtcattggactcacaaaagtaggggcgctggaaggcgcgccccacggcataacagtcaatgcgctctgtccgggttatgtcgatacccagcttgtacgcaatcagcttagcgatctatcgaaaactagaaatgtcccttacgactctgtacttgaacaagtcatttttccgcttgtgccgcaaaagcgactgctttccgtcaaggaaattgcggattatgccgtgtttttggcaagcgagaaggcgaagggcgtcactgggcaggctgtcgtccttgatgggggctacaccgcacaatgacataaaaaacacacttgctccgctagggaatcaagtgtgtttttttctttgcttatttccaaacatcattagcgatctcaaccacatggcggagcttcgcccattgctgttcttcagtcagcttgttgccttcctcagttgaagcgaatccgcattgagggctgaggcaaagctggtctaagcttacataacgggacgcttcttcgatacggcgtttcacgtcatccggattttcaagctcaccgaatttagatgtcactaagccaagaacaagctgaagatcagaccgttttacgtaacggagcggctcaaatccgcctgagcgtgaatcatcatactctaagaaaagtccgtcaagattcaagccgtcaaaaatggtttcggctgctgcgtcatagccgccttccgctgtccaagtggactggaagttgccgcggcaaatatgcatggttaccgtcaagtcatccgggcggtctgcaatcgcgtcgttaatggatttcgcaaacagctggcgaagctcgtcaggcgttgttccgaacgcttcgatttgttttaagcctttttctgataagaaaacggcccacgctgtatcatcaagctggaggtagcggcagcctctgtcataaaacgcttgaatcgcttttttatatgctttggatacatcgtgctggaaaagttgataatcgtttttgtattcatccttttccagttttccgcggaaaaacagcatattcggacttggaatcgtcatctttggcgtcgcgtcaccggcaatgctatggagaaatgagtaatcttcaagcattgggtgagttgaaaagtcgatatcgcctgtgactttaatgccgcgtgcttttgtctgtacgttatggaattgaatgccttgctcaggagtaaacggctcaacgccatctaagttttccaggaaatcaaagtgccaccatgctctgcggaattcaccgtctgtcacgacgttcaggccggtttccttctgtttttccacaatgcggatgatttcgtcgttttcaatttggcgaagctgctcagcggtcatttcgccggccgctttttgcagccgcgcttttttgacgggctcagatcttagcaggcttccgacttgatccgcgcgaaacggcggtttttttctttgaagtgatttttgttctgcgggtgttgtttgttgtgacatgttgtccattccttctttccattcaaatataaaaaagctcttcctttggataaggaagagcttgcgtgacaatctcaaccttatcttcaagagcaatcattgctctaaaggatttagcaccattctgttaaacagcggttgccgggtatcgcagggccagtccctccacctctcttgataaggaaaacctttttattaaattttctgatagtatctattattcacacattttctatttctgtcaatgatagattatctccacacatcgttggcaatgtcgatgacatggcgcagctttgcccattgctgctcctctgtcagaaggttgccttcttctgtagaggcgaaaccgcactgcgggctcaggcatagctggtccaagctgacaaaacgcgcggcttcattgatacggcgtttcacatcctcaggattttcaagctcgccgtatttcgatgtgatcaagccgagcacaatttgcagatccttgcgcttcacaaaacggagcggatcaaagtttccggagcggtcatcatcgtattccaagaaaaggccgtcaaggtttaagccgtccaaaatcgtttccgctacagcgtcgtaccctcctgatgccgcccaggttgagcggaagttgccgcggcaaatgtgcattgtgatcgttaaatcgtcaggccggtctgcgacggcatcgttaattgttttggcaaatatggctggcaatgtttctggatcaccgccgagcgcccggacaacctctctgcctttgtcctcaaagaagagagaccatgacgtatcatcaagctggagataacggcagccagcatcatagaaggctttgattgcttttttgtacgcttgggccatatcatgaaagtattcctcttgatcgtcataaatccctttatccgccttttcgccaaaaaacagcatatttggactgggaatggtcaattttggcgtcgcgttaccggcaatctcatgtaaaaattgataatcaccgagcgctgggtggctcgtaaaatcgagttttcccgtcactttgatgctgcgcgctttcgtttttgtgttatggaactgaatcccctcagccgggatgaacggttccacaccgtcaagcccttccaggaagtcataatgccaccaggaacgccggaattccccgtctgttaccacatcgagaccgatttctttttgtttttccacgatgcgggtgatctcttgattttcgatatcacgaagctgttccgctgtcatctcaccagccgcttttttttgccgggcttcctttaccggaacggaacgaagcaagctgccgacatgatcggcgcggaaaggtgctttgcgttgtttttctgttttttgtcctgcaacattcgtttgttgagccatgttattcgcctcttttctgaaatattaagcatgtaaaaagctcttcctttgtgtaaggaagagcttgaacgatcaaatctccgcctcatctgcaagaacgcaatgttcttaaggatttagcaccattctgtttgaaacagcggttgccgggtatcatagggccagtccctccacctctcttgataaggtacaacttcatattcagatttcaattatcttaatattattacttttggatcaattgtcaatgctttttagaaaatactttcatcttcatcgttatataaaaccatatcaagcacgatagcgatggcagtgcaaatcagaacatcttcctcgtatgcaatctgcaagtgataggaatcaccccaactgagccactttttgctcactgacatccggacattttccccgtccgtcagctggaattcatccctccataaatcaccatcgatttcccagttaagcccggaaatcacaaatttcggtttgaaaaacgttactttcttcgttacctcacaaactgttttcccgccaattgaaatctcatagcgcggcaataaagacattagtttttgttctatggaaacgagcgttttcccggatgagtctgtcatttgtaatgagtctcctaacgaaaaaaaacgcccctccaccttgaatgtttcttgttcatcccggttataaatgtgaaatgcatctttaaatgagaacattttttgtttcataaataactcgatcattgctgaagtctcctttggatttgccttgtatgaaattacggataggtggcgaaaaggtttcaggctctaaatcaaaacaattttaaaaggctgcgtgattcagcagccttttcgtttgaaatatagaattaggaaaggtgcatccgacgtttttggcggatggcgtcaaggtcgattaggttgttgtgatgaggtgcggctgctggcagagggcttgtcttttgcggtttgcggcgattgtccttgctgaaagaaaaaagaagatagccgcataatgcgatgataataaataggatcatattacatacctcccaaaaaaagttttggtactctctattgtacggataaaaagtcaaaaagtattcaaaaaattctaaatcaataaataacaagaaactgtccctctaaaacagtataacctgatgacctgaaaatagtcttgaatcacgctgtttgctcttgttgatgattggttctatagttactatcgacgataaaataatttcctttatataacttttaacctaagtttacgtaattctaattacctgtttttgggtgctgttttcttgcttgtttggtttataccctattttgcggaattgaacacaaaaaacccaaattacggagcatttgggcggtacgggtgaatacggattgtatttaggggatttgaatgttttatttgaagaagcgcttgaacatttttctgattttttgaaatgggctggatttcttttgcatgttaagcggcctggaaatgatccattttttcaagagactcttggcagcgattgcatgttttgtcattgtttttcctcctcatttgttaatacttgttttacggaggacgtgtttaaaatgtttcattttcacacaaaaaagccagtccttttttggactggttttttggcactatgcttgcgcttcaaactgctttgcaatctcaacgatgacatttacggctttgaccatgttgtcaactgagatgtattcaaatttgccgtggaaattttccccgcctgtaaagatgtttggcgtcggaagccccatgtaggacagctgcgatccgtcggtgccgccgcggatgggagaaatcttcggttcgatgccgaggttttccatcgcttgcttggcaatgttgacgatttcgatgacaggttcaattttctctctcatgttgtagtattggtcgttcatatccagcagaatcctgtcttgcccgtattcgttttgaagttcttcaacgacacgcttcattgtttcttttctgttttggaaattctctttgtcaaagtctctaataatgtagtggagctttgtttcctctacgtctccttgaatcgacagcaggtggtagaagccttcatagccttccgtatattcaggcgcttcgtctgccggcagcaggctgttcagcttcatcgcgattttcgcagagttgatcatttttcctttagctgttccgggatgtacgttgttgcctttaatcgtaatttttgcggcagcggcattgaagctttcatattcaagctcgccgagcggcccgccgtcaaccgtgtaggcaaaggaagcattgaaccgtttcacatcaaatttgtgcggccctcttccgatttcttcatcaggcgtaaaggcgactctgattgtgccgtgcttgatttcagggtgtttgatgaggtaatccatggctgtcataatttcagcgataccggccttattgtctgcgccgagaagggtggtgccgtctgtggtgatgagtgtatggcccttatagccagacagctcagggaattgatcaggtgacagggtgacctgcagcttttcgttaagaacgatgtcttttccatcatagctttcgatgatttgcggattcacgtttttgccggtaaagtctgtagcggtgtcgacgtgagcgagaaagccgattgtcggcacgtctttttcagtattggagggaagagttgccatgacatagccgttttcatcaatggctgcatcctgcatgccgatggacttcaattcatcaacgagcatgtttcctaatgtcaattggccgggtgtggaaggacacgtgtcaacggattcatcggactgtgtgtcgacttttacatatgtagtaaaccgttcaatgatttcttctttcatttccaatcatctcctttgtcttattttagcatggcgggatgagagatttctattgcacaataccgtttcgaatggcaaatacgactgcctgtgtccggtcttgggcattgcatttttgcaggatgcggtgcacgtgggttttcacagtgctttcactgacgaaaagcttttcagcaatatcctcatttctcagtccgtaggccatttgctgaagaacctcaagctctcttttggtgaacggctctgccagttcttctgcatgaggctgttgcttcgctcgaaatgtctcactgataattttagcagctgtgactgtacggaaaatcgcctcgcctctcgccgcagcgcgaatcgcatctatcaactcctcaggaagtgtatccttcagcagatagccgactgcgcccgcacggatgccttcaaatacgtattcttccgtgtcaaaggtggttaaaatgactatctttgtatttggaagtgcggacataatgtctttcgccgcttcgatgcctgagcaacgcggcatctggacatccatgaggatgacatcgggttttgtttgttttgcgagtgctataatatcgtgaccgtcgccggcctcgccagaaaccgtcatatccgtctgtgcgttgatgacgtagcggaagccttcacgcacaagcggctgatcatcggcaagcgcgacgcgtatgttatctttgttcatctttttgctccttattcgttgtcatgagcggcaatgacagctcaattttcaggccgctcggctgtacggcactgaaagtaagggaaccgcctgctttttctgcgcgctctttcattcctgtcaggccaaatccataagtaaggatgccggtgaattgtccgtcgtcggtgattgtgacatagagatgggacttgtcattagaaatgacggccgccgcatgagaagcgtcagcgtgacgaatgatattggtcagcgcttcctgcaagatgcggtagatcgtttcgctcacgtttggaggccaagactcttctgacagtccggcagtatctaaagaaacgtgcaagccgctccgttcctccacttgatgaatgagcccccgcaaagcggtaagccccaccatcgattcactacggcccatttggtgaacgacagaccgcacttcttgaagacactccctggcgacactcagtacattttgaatgactttttctgaatcctccttgctgcttttaaggatatagggaagggattgaagctgaacaataacagaagtcagctcgtgaccgatgctgtcatgaatgtcgcgggcaattcttgtacgttcctcaaggaccgcgtaccttaatgaaagaacagaagcctcctgcagctctgcatgcgctttctggagttctttatgagcatgctccagctgcacatgcatttttgccaattcagcatgattccgttcagcctcccttctcgcttctcgtctgaaacgcatggaggagaagaggacgtacagcccgagcatgatcgagatgttgctgatgatggtattcaagcttcccccttgtgaggataggagtaatatgttgcctccaattaaacatgctgtgaagatcaaggatagccgtgaagggagtctaaaggcggcatatatcattaaaaatacaatcaaaaaataggcggcaccctgctcttggccggaaacagcccaaagaaaaacggtcaggatccaaagcccgacgaatatgctcaaactaacagcggtggatgccacatagggaatgatccaaatgaatgctaagtataccgcaaatacaaatgctaacaaaatgggatcagccttagttggatgagataaaaattgtatgcaattcaaaatgagaataaggctcggcacaagcttcttgtagtagtgccgagccggagtttgtccgttcatgctggtccttctttcggttatggaatggatactttgccggcggtcagccgtctgtatgctttgtaaagcatgatgttgcgggctgtgatggtgccgaggggaacgaagaacatagaatgaataatggcaataaacatctcgttgctctcaggcagccatgttctcgcggccatgcgcaaagaaagtatcactagaatgaggataacactcccaagtgagccgcgtgaagtgacctttccggtttccgggtgaatccgcacatttaccatcttcccaatgccaaacccgcaggccagcccgattaataataaaatgccgctgatcgccacatgtaatacggaatgaaaatacgccggctgaaacgatgctgatacgccccataagagcagcagcggaatgatcagcaacttcccgggtctgacagctctctctcggtacatcgataaaataataagaatcaatacaataaaaatatatgggctcatcgccatgtcatcaaatcctttctgcattaagcatagcgaaaaagggaaagaaaaacgtcaaccggcagattgatttttcagctgctatacttgttcgcgctgcataaaggtatgaaaatgctgataatatatgaaaaaactattaataaacgattaaacttcttaaaaatggatgtggaccggttctaaacactatataatgaaaacaggtcattttttaggagggttacatcatggcaatacttgttactggcggtgccgggtacattggcagccacacatgtgttgaactattgaacagcggctacgagattgttgttcttgataatctgtccaacagttcagctgaagcgctgaaccgtgtcaaggagattacaggaaaagatttaacgttctacgaagcggatttattggaccgggaagcggtagattccgtttttgctgaaaatgaaatcgaagctgtgattcattttgcagggttaaaagcagtcggcgaatctgtggcgattcccctcaaatattatcataacaatttgacaggaacgtttattttatgcgaggccatggagaaatacggcgtcaagaaaatcgtattcagttcatctgcgacagtatacggcgttccggaaacatcgccgattacggaagactttccattaggcgcgacaaatccttatgggcagacgaagctcatgcttgaacaaatattgcgtgatttgcatacagccgacaatgagtggagcgttgcgctgcttcgttactttaacccgttcggcgcgcatccaagcggacggatcggtgaagacccgaacggaatcccaaataaccttatgccgtatgtggcacaggtagcagtcgggaagctcgagcaattaagcgtattcggaaatgactatccgacaaaagacgggacaggcgtacgcgattatattcacgtcgttgatctcgcagaaggccacgtcaaggcgctggaaaaagtattgaactctacaggagccgatgcatacaaccttggaacaggcacaggctacagcgtgctggaaatggtcaaagcctttgaaaaagtgtcagggaaagaggttccataccgttttgcggaccgccgtccgggagacatcgccacatgctttgcagatcctgcgaaagccaagcgggaactgggctgggaagcgaaacgcggccttgaggaaatgtgtgctgattcctggagatggcagtcttcaaatgtgaatgggtataagagtgcggaataagaatggaggccttctcaatagagaaggcctttaaagaacaagggtgcctgaacaggcacccttgttagctgttatttgattttcacaataacatcattactgaattttagtttccaagtgccttttgcataagcttccttgtcaacttcaaatgcttttacacctgttactttaatattaggatttagatcactcaaaattttagagttatcaacttttgtctcagttgcatagtttacagaagcatcaatatcagaatcataagaagtaccatcagcatcaactaatttaacagttggaattgaaaaagagctaatcggttttttagatacgtttttaattgtatattgaacagctacaatagtacctccctcagatgctttcttttcaacatattgagtaccgacagtatctctgtcctctaccttcgtaactgtcacttcagttttttcagtttttacagtatcaccgatattgtatgttttttcagtttctgctttgctgctgcttgatgttttggaagtggcttctgaaccgcctccgccaatcatattaccgataataatgatgacaacaactgcgagaataaacgtaatgattttatgtcgcataaaaaagttacgttgatccttaccgcagttaggacatttttttacaccctttgcaatttcttgaccgcaagctttacagggtactagttttcctgccattatatttcctcctatgtaataaaatgtacgaaacatatgtactataatgcctatattatttcacttagtcaatataaaattatgaatttctcataattgttatcatttatagttaaatttacttgtaaaatatatgctttttttcttatcggctatatctgttcttttttaatagataaatcgtttttttcttccagcttatctgatgaaaactccgtaaataccccttgaaccaattcgaaccgtcccttataatgctaatattggaaagtgaaaaggatatgataaaaacagtggttttctagggttccgcaatgcaaattggactgtgaccgagagaaaacacatagcagcttggctgttatgacacggtgggataaaagcccaggagtttctgctctttttcgagagcgttctcctgggtttttttatttgctagaacagaacaatgagaaggagtgttttcgtgatgaaaaagagaatgttggatgtacttatgcttgtgattggcgcttttttcttcgcgcttgcggttaatttatttgcgattcccaatgatcttggggaaggcggagtcactgggattacgctgattttgtattatctgtttcaatggtctcctggtgtcacgaactttatcttaaatgcgtttttgcttttaatcggctacaagtttctggatggaaaaacaacggtttatacgatcattgcggttgcggcaaattcgctttttcttcatctgacacatgggtggagcattccgtctgatgaattgatcattaatacgattttcgcaggtgtatttgcgggagtcgggatcggcatgattatccgggtcggcgggacgacagccggttccgcgattttggccagaattgctaataaatatttagactggaatatcagctatgcactcttgttttttgatttaatcgtagtatttagctcttattttattattggtgcagaaaaaatgatgtttacgatcgtgatgctgtatatcggtaccaaagtgatggacttcattattgaaggtttgaatacgaaaaaagccattacggtcatttcagaaaataagagtgagattgcagagcaggtaaataccttgatggatcggggcgtgacgattttatcagggaagggaaattatacgggccagtcaaaagagattttgtatatcgtcattaacaaacaggagctgtctatgctgaaaaaaatcattagaagctgcgacaaaaaagcgtttgtgatcgtacatgacgtacgcgatgtgtttggcgaagggtttgtggatatatctaaataaagaaaaatccctctgtacttgaaacagagggattttttcatttagaacggatatttgcggtattgcttctgtatcgaaatccattttgtcacggtaaattcctcgacgacccacggattgccgaagcggccgacaccgcttgctttgttgccgccaaaggcaatattcggcgaatcattgacggactggtcgttgacatgggtcatgccgctgtcaatttgcagggcgaacttttcgcctttttctaaatcagaagtgaaaaccgcagagctgaggccgtattcagtatcatttgccatgtcaatcgcttcctggtcgctgccagctttaataatggttgcgattggggcaaacagctccgtttgggcaattttgctgttgttgtccgcaccgacaaagacgtacggcgtcagtacgtttccgacgcgttttccttcaaccgcaagctctatgccgtctgcctttgcctgctcaatgatctccagcgctttctcgatttggcgctcgttgatcagcgggccgacaacggttttcggatcggtttgatcgccgtacggaagctgtttgacacgggaggtgaatttttctacaaactcatcgtatacatcttgatgaacgatgatcctgttgataatcatacagatttgtccctggtgaataaattttccgaaaatcgcggcatccacagcacgatcgacatccgcatctgaaagaacggcaaatggattgttgccgccgagctcaagtgccattcgtttgaaggcacgcccggcgatttcaccgatgtggcgcccgactgctgttgatcctgtaaagctgattaatctcgggattggattggtgagcatgccgtccccgatttcctttacatccgtcagcatgacgttaaggacaccggcaggaagaccggcgtgttcaaacgctttcgcaatgatggtcccgccggaaatagcagtttggatatcaggcttgtgaacaacactgttacccagcgcaattgcgggcgcaatggatctcatagataaattcattggaaaattaaatggagaaatcgatgaaatgacacctagcggaaggcggtaaatcttattggttttcccttcaatgtcggatggcacctctttgacgccgcctaattcaccagtatacgtcatggcttcatctaaaatcgcaatcgtttgttccagctcgatcgttgatttaataatcgttccgccagtttcgcgggcgatcaccataatgatgtcatcacggttttcctgtaaatagccgcgcgctttttgcaggacggctttccggtcttccgttgtgctcttggcccactctttttgggctttccgtgcaatgtcaaacgcatcctctagctgtttgcccgttgccaaagatgctgttgtgatcacagactggtcatacggattcaaaatgtcctccgtacgtccgctttctcccccagtccattttccgttgataaaacttttgtttaacgtttcgaaactcataagatgaccctcctttggtcctgcatgtcttcttctatttccgctgaagccaatatgtaaacgaatgaggtttccctttcagtttctcgtctatctataccggatatactcttttttagtggagaacatgtgtgtttcgccttatactgaatatacagatccttacataagagaggagactctatgaaatcgctgctggctatttatcccggttcgattgtgtctgaggagctttgcataagggaaggctgtctatgtttttttgatgagagcaatcagagatatatctccattccgaaaacagagatcagtgaaaaagaagtattggtgctgcaggcatttttgacgcctgcggatgagggcaatcaaatgtctatgaaatcacctgaggaaaacaagtggttttcgttccttttttccagaggggaattgccggcgtacataaagaaacggacgagatttgttcactttcatttattcggcaaaatagaaaggacgtcctttacggaagcggttcgccatttttggccggtgtcttttgtgattgtgtggatccatgaggacagaggcgtgattgtcgagcaggaaagtgaagcggcggcggagaagggcgaactggaatcgctcgcaaaggttcttgaaagtgatttctacttcagtgtccgtttttacgccggaagattttacgagccggatgagtgtctgcgaaaacattatgctcgtgaacaggcgtatttcctgtttgctgaaaaacggctgcctcaggtgcagagtgtgacctttgagatgatctttccttttctattattagaaacagaaaaagaaaaactggaaacgctgctctctgaagaagctgagcttttatttggaagtgaagctgagctaaggaagaccattaagctgtttattgaaaacaactcaaacgtcacattaacagcgaaaaagctgcatctgcatcgcaacagcctgcaatatcggattgataaatttattgagcggtcagggatagatatcaaatcgtacaaaggcgcgcttcttgcctattttatctgcctgcaaaatgaaagttcagaataaattggaaatatgcacgaaaaatggctgggtgattttatgaacgctgcccattttagcgagagggaattgctgttacactcaatataagaaagcgtttacaataacaaaggaggatgttagatggctgaattgcggatggagcacatttataaattttatgatcaaaaggaaccggcggttgatgactttaaccttcatattgccgataaggaatttatcgtattcgtcggcccgtccggctgcgggaaatcaacgacgctgcgaatggtcgcaggacttgaagaaatttcgaaaggcgatttttatattgaaggaaaacgggtcaatgatgtagcgccaaaggacagggatatcgcgatggtatttcagaactacgcgctctatccgcatatgacggtctacgataatatcgcgttcgggctcaaacttcggaaaatgccgaagcctgaaatcaaaaaaagagtagaagaagccgctaaaattctcgggcttgaggaatatttgcaccgtaaaccgaaagcgctgtcaggcggtcagagacagcgtgttgcgctgggccgggcaatcgtgcgggatgcaaaggtgttcctgatggatgagcctttgtcaaacctggacgcgaagctgagggtgcaaatgcgggcggaaatcattaagctccaccagagactgcaaactacaacgatttatgtgacacatgaccagacagaagcgctgacgatggcgacacggatcgtagtcatgaaagatgggaaaattcagcagatcgggacgccgaaggatgtttatgaattccctgaaaacgtctttgtcggcgggtttatcggatcaccggcgatgaactttttcaaagggaagctcacggatggcttaatcaaaatcggttctgcggcattaaccgtcccggaaggaaaaatgaaagtgctgcgtgaaaaaggctacatcggcaaagaggtcatctttggcatccgtcctgaggatatacatgatgaattgattgtcgtggaatcatataagaactcttcgattaaggcgaagatcaatgttgcagagctgctcggttctgaaatcatgatttattcgcagatcgacaaccaagactttattgcgcggatcgacgcccgcctcgatattcaatcgggcgatgaactgacggttgcatttgatatgaataaaggccatttctttgacagtgagacagaagtgagaatccgataagatcaaaaaaaccggacatggggatgtccggttttttgctattgaaaatttcagaatcaaaccgatgaaaaaggaggaagaaatagacagaaagcaggagaacgatgaaacgattgtttttaagcatctttcttttgggcagctgtttggctcttgcggcttgcgctgatcaagaggcgaatgcagagcagccgatgccaaaagcggaacaaatgaaaccggaaaaaaaggcagtacaagttcagaaaaaagaaaacgatacatcagcatggatcaaaacagagaaaccggcaaagctaccgattttgatgtaccacagcatttcttcaggaaacagcctccgtgtgccaaagaaagaattcgaggcgcatatgaagtggcttcatgataacggctatcagacattaacaccgaaagaggcatatctcatgctgactcaggataaaaaaccgagtgagaaatgcgtgctgatcacatttgatgacgggtacaccgacaattatcaagatgcgtatccggtgctgaaaaagtacgggatgaaggcaacgatttttatgatcggcaaatcgatcggacataggcaccatctgacagaggaacaaatgaaggaaatggcacagcatggcatatcgattgaaagccatacgattgaccacgttgagctgaacggattaacgcctcaacagcagcaaagcgagatggctgattcgaaaaagctgttcgacaacatgtttcgtcagcaaacctccctcatcagctatccggtagggcgctacaatgaggagacgctgaagaccgctgaaaaaacaggctatcaaatgggcgtgacgacagaaccgggcgcggcttcaagagaccagggaatgtatgccctccatcgtgtgcgcgtgtccccaggcatgtcaggctcggcttttggtgcgtacatcgaatcaatgaaataaaaaaaggcggcgtttaatcgccgccccctccgccgccacagccggaatcgccgccccctccgccgccacagccggaatcgctgaaacctccgtcactgctgcatccatcatggtgtgagccgttgtctgaataaccgaaatacccgctgtccgcctgctggcggcttttattttccgatggctgcggctgaatgactgaaagaaaaacaataatagatataaacaataagatgatcacaatcacttcgcgtcactcccttttttcaccatatctgttatgcggatgaaacgctgaccggtttcatttcaaagtgatcgattctttcaggcggtctctgagccagcgcttcagcaccccatgtcctttgtttgacaataaagtgccgacacgccaatacatagggggatgaggagcgaactgaaaatcaatcaatctgaaaaaccagcttttatcacgggtgagagaatcaatttgaagctcgtcttcacctgcttcagagctgtaggcactttgtttctgtatgtcctcatcctgccgaaccgccaagattctcaaggcttcagccatttgtttgtaaccgccccccagcaatgatgcgccaaggttgtcagcacgcacctccatccattgtgaacaaaaggattgatagagctggaacaggataatgattgccataatgaaagcccaaagcgcaattttgtgggcctcgggatgggtgatatgctgctcaaataagaggaaaatcccaacgacagctccaagatatagaaaacgcaaaagctgtgatgacagaacgtcacgttttttgatatgaatcgcctcatgggccagaatgccttcaatgacacgctgtggaagtgttagtgtggcgcttgttaggatgaccattgacctcccgacattcatgcctactgccattccgttgtaatcatcactctccgtttcgtatatgcggacatgggaaatgccggccgatcggaaaatcttatcggccgctgcctgtacatgcggatgatgacaaggcttggcgtccattgccgcccgcaacacacggtctgacatatacatgttgaatacccaatacaggattacggcaacagccatgacccatggagaggcgtgtaatgcgtataacgcgagcaccaataaggcgtaagcggatacccctcttacgctggcggcaaaataaagcttaccgagcagccgcttcacattttttctatgataaaacggcaaaacagaaattacattgtccacatcgttttctgcatctgtgtactcctggagaattgttttccatttttgcggttccttcaccgtcaaaaacagtgtttcgccgggaagagacagtttaatgacttgctgaaagcttgttgttaaatctagacgtgatgaatacatcgtcagaagcggatggagctttaagagatcagccgttgattcaagctgaatgtccttcaaatcggaaagcgggtatgtacgggtttcatagcgagagctgatatgcaatttttctaaggcagctgaataaaaaacctttacgctgaaaacattcagtatacgcttcaccagtgcccctccgccggagatcatgccgaaaaggattacatatttgagggggcttgggtcaggtccatagatgaaaaaaatgacagcgcccgcaaacacaatggcggtcagcgtaatgtctgacaggagacgtgttttgtttctggccagctcaattttctgccagtctcccgaaggtttttccgcacgctctgaaacaatgagatccattgcggtccaatagcagtagaacattgtcgcgattgagacaatgccgtccatgaatgagagatgagagaagatgtaaactgcagcgccgacccatagaacaatatcaatccagaagtctatggccggaatgagttttgcagccagggctgatatcaaataaaatccaagcccgagaagcataaagagaaatagatgagttcccataggcatgccagattcctttctatctagtatttccaactattactatagcatgggatgggaacttgcaaaaatacggacatgcaaaaaagcaagctctttcgttttccgaagaacttgctccgaggtgtatcaataaaattggtgcagcagcaataaggttaaggatactgtaatcgcgcccccgatgcgggtagacacttgggcgaaaggcattagctcaagcctttcagcggcgcttaaaatggcaacgtcacccgtaccgccttgtccagaatggcacgcattgataatggcggtttcaatcggatacatgttcagccattttccagtgaagaagccaacggccatcatggtcacaacgacagacagaatcgtaataatattgctgaggttaaaagcggcgacaagcttgtcccacggcgtcatggataccccaatcgcaaagagaagcgggtaggtcacagctgttgaaaaaaagcgggacactccaaacgcgccattttcaattgaggcaggcaccaatctgaacagcttgattagaacagccagtaacagcatggcaacgggtgccggaaaaccgaaaaaatcatgagcgagcatgccgactaagtataaagaaacagcaaggataccgcctgacgcaaataaagaaaggttgaacatttgttgcccgctttgtgattcctccagcgcaggggactcttcttcggagcggtccactttgccgttgcctgtccattccggttttttctttccgattcggttcagcaatcccgctagaataatcgcgcacaagctgcccagcataatcgatggcagaacaagtgcaaacgcttccccttgagaaatgggcatgatgtcagaatatccgatggacagcgggatagcgccttctccgactcctccagccataatcggaatgacaatgtacagcagggtatgctgaaatccgagtccgagcaatgtcccgacagccagtccgacaatagcggctgtgacagaaccgacaataagcggaataaagattttcatgaatgcttttacgagtgtttctcttttcatgccgagaatgcttccgacgacaataccggcgataaacaaatatagaaagtttgagttttctgtaaattctgtggtggatttgacgatatcattaggcagcaggtgatagtacacgacagcggacggaataaaagtagctaggatggccgggccgccgatagaacgcacaatcggtatcgatttgccgatttgggcaaaggtaaaaccgaaaaacgccatgacggcaatggatgtcaaaatgtcactttttacatcgtgatgcataacaaaaacagtgattaatataaacagcaaggcatacacaggaagcggtatgatgcctacttttatattcatggctttcgcaaaccaattctcttttcgaaccccttcgtgaattgtatccgtttgcaattgcatttgtgtttgaagctctcccattgaaaaacctcccctattcttgatgcagtgaaattgttcactatgttaagtatactaaaaaattgaaattattaatatattaaaaatttactattcaacttttctccacttgccggttcaaatgaaaagaggcatcctgcctaaaatctgtttatgacggagtgcggagaaacgagtgctggtgcagggcaagcattttgttcgcaaggaacgatgtgttgatgtacgataataaagggtcatttatcctagcagccgacataaataagcaacaaaatagacaaaaatccgtcacatagtgcgggactttttaggtattttaggctttatttttgaaatgaatcgttgtaaagtacttaatatgaaccagtcagagattgtgtcatttggtcagtctggcaatcttgcctcatattggacgactttttgacacatttgtgaaatattgaacaatatttttttcgtctattttgtgaattactgatcaaagtctcggttctatttgtgaagtagtgagcaaattaacagttttaaccggaaatggaggagaaagcatgagtgaattggtattagcccgcatacaatttgcatcaacaacgttgtttcacttcttgtttgtgccgatgtctatcgggcttgtgtttatggttgcgttgatggagactctttatcttgtaaagaaaaatgagctgtatctcaaaatggcaaagttttggggacacttattcttaataaatttcgcagtcggtgttgtaacggggattttgcaagaattccagtttggactgaactggtcagattactcccgttttgtcggagatgtatttggcgctccgcttgcgattgaagcattattggcgtttttcatggaatctatttttatcggattatggatttttggctgggaccgcctgccgaagaaaattcacgcgctctgcatatggctcgtatcattcggaacgatcatgtcatctttctggattttaacagcaaactcctttatgcaggagccggtcggctttacgatcaaaaacggccgcgcggaaatgaatgattttggcgcgttgattacaaaccctcagctttgggttgaattcccgcacgttattttcggtgcgcttgccactggagctttctttattgccggagtgagtgcttttaaactgctgaagaaaaaagaagtgccgttctttaagcaatcttttaaactcgcaatgatcgtcggcctttgtgccggtcttggcgtcggccttagcggacacatgcaggctgagcacttgatggaatcacagccgatgaaaatggctgccagtgaaggcctatgggaagacagcggtgaccctgctgcttggaccgcttttgcgacgatcgatacaaaaaatgaaaaaagctcaaatgaaatcaaagttccttatgccttgagctacttggcttatcagaaattcagcggaagtgtcaaagggatgaaaacccttcaggctgagtacgaaaaaatatacggaaaaggcgactacattccgccagtgaaaacgacattctggagcttccgtatcatggttggcgcaggcgttgtcatgatccttgctgcgttaggcggcctctggttaaaccgccgcaaaaagcttgaaaacagcaaatggtatttgcgcatcatgatcgcgttgatttccttcccgtttcttgcgaactccgcgggctggattatgacagaaatcggacgtcagccttggacggttatggggttaatgacaaccgctcaatctgtgtcgcctaacgtaacagcgggctccctgttattctcaatcatcgcattcggtgtgatgtacttgattctgggcgcgctgcttgtcttcttgtttatccgtgagattaaaaaaggtgcggagcatagtgatcatcatgatgttcctgtatcaacagatccatttagtcaggaggtataccatggcatctcttcatgatctttggtttatactcgttgctgtattgtttgtaggattcttctttttggagggctttgatttcggggtcggcatggcgacccgttttcttggccataatgaattagaacgcagagtgctgatcaacacgatcgggccgttctgggacgcgaatgaagtgtggcttttgactggtgcaggcgccattttcgcggcattcccaaactggtatgcaacgatgctgagcggttattacattccgtttgtcatagtgctgcttgcgttaatgggccgcggggtcgcgtttgagttccgcggcaaggtggatcatttaaaatgggtaaaggtttgggactgggtcgttttcttcggcagtctgattcctccgtttgtgcttggtgtgctgttcacgacattattccgcgggatgccgattgatgccgacatgaacattcacgcacatgtatctgattatatcaatgtatattctatacttggcggtgtgacggtaacacttctttgcttccagcatggattaatgtttatcacgctgcgtacgattggtgatttgcaaaaccgcgcccggaaaatggcgcaaaagataatgggtgttgtttttgtagcggttcttgccttcgcggccctttctgcgtatcagacagacatgtttacacgccgcggcgagattaccattccgctcactgttttgattgtcatctgctttatgctcgcggctgtatttattcgtaagaaaaaagacggctggacatttgggatgacaggcgctggtctggcgctgaccgtgggaatgatctttatttccctattccctcgcgtaatggtcagctcgcttcatagcgcatacgatttaacagtagctaacgcttcttccggagattattcgcttaaagtcatgtcaattgcagcattaacgctattgccgttcgtcatcggcagccagatctggagctattatgtcttccggaagcgcgtcagccataaggagcctatgacttattaatgggaaaagacctgtttcgatataaaggaatgaagcggattctcaccgtgattacttgtttaacgctgattcagacagccgccattattatgcaggcagagtggctgagtgaggccgtaaccggactgttcaacgggaagggcattacctctctttttccggtgatcggctttttcctcatcgcttttatcgcccggcacggggtgacggtggcgcgacagaaaatcgtctatcaatacgccgcccggacaggagcagatttgagaaaaagttttcttgatcagctgttccgattaggcccccgctttgcaaagaaagaggggacggggcaaatggtgacgctggcgatggaaggcatcagccagttccgccgctacctggagctgtttctgccgaaaatggtcagcatggcgattgtgcctgcggcagttgtcatttatgtgttttttcaggatcggacatcagccatcattttagtcgctgctatgccgattctgatcatctttatgattctcctcgggcttgtcgcgcagagaaaagcggatcgtcagtggaaatcctatcagagactttccaatcattttgttgattctcttcgcgggctggagacattgcgtttcctaggtttgagcaagtcacacagcaaaaatattttctatgtgagtgagcggtatcgcaaggcaacgatgagcacactccgggtggcgtttttgtcatcattcgccctcgattttttcacgatgctgtcggtggcgacagtcgcagtatttctgggcctgcgccttattgacggcgatattttgcttggccctgctttaacggcgcttattctggcgcctgagtattttttgccggtgcgggaagtggggaatgattatcatgcaacgctgaacggccaggaagcaggaaaaactattcaagagattttgtcacagcctggttttaaagaagagacaccgcttcagcttgaggcttggtccgatcaggatgaactgaagctgtcaggcgtatcagtcggccgttcggtgtctgatattgatctctcattcaagggcaagaaaaaaattggcattatcggtgcaagcggagccggaaaatcaacattaattgatattctcggcggatttttagagccggatggcggaatgattgaggttaatggtacaagccggtcccatttgcaggtcggcagctggcagaagaaccttctgtacatccctcagcatccgtacatttttgatgatacgttggggaacaacattcgcttctaccatccaagcgcttcggcagaggatacagcccgtgctgctgctgcggcgggactggcggagctggtggataaccttcctgaaggattagaggggcggatcggggaaggcggccgggcgctcagcggcggccaggcacagcgtgtcgcgctggcccgcgcctttttgggaaaccgtccgatcctgctgctggatgagccgaccgcccatcttgatatcgaaacagaatatgaaataaaagaaacgatgctggatttatttgaggataagctcgtctttctcgcgactcaccgccttcactggatgctcgatatggacgaaattatcgtgctggacagaggcagggttgcggaaatcgggactcacaatgaactgctggagaaaaacggtgtgtataccaaactcgtgaaggcacaactgggggaaagagcatgaagaaagaagaatggattttgccgtatatcaagcaaaatgcccgcctgtttgttctggttatctttttgggcgcggtgacgattttttctgctgcttttctcatgttcacctcaggttttttgatttctaaagcggcgacaaggccggaaaacattctgctcatttatgtgccgattgtcgctgtgcgcacctttgggattgcgcggtctgtgtcgcgatatgtggaacggctcgtcgggcatcacatcattttgaaaatcgtatccgacatgcgcgtccgcctttacaatatgcttgagccgggtgctttgatgctgcgttcccgttttcgcacgggggatatgctcggcattttgtctgaggatattgagcatttgcaggatgcattcttaaaaacgatttttcctgcgatctcagccttgctcctgtatgctgtgtcagtgatagcgctcggcttcttctcttggccgtttgccatattgcttgcgctgtatttgtttgttcttgttgtattgtttccggttgtgtctttgctcgtgacgagagcgaagaatgcgaagctgaaaagcggacggaatgtgctgtacagccgtctgacagatgctgtgatgggtgtcagcgactggatgttcagcggacgccggcatgcttttattgatgcttatgaaaaagaggaacgtgattggtttgagcttgaacggaaaaaacaacgctttacaagatggcgggactttgctgcgcaatgccttgtcgctggccttattttgctgatgctgttttggacagcgggacagcaagcggacggcgagctcgctaaaacgatgattgccgcttttgtgctagtggtgtttccgttgacggaagcctttttgccgctttcggatgccttaggcgaagtgccgggctatcaggattctatcagacgcatgaacaaggtggctcctcagctggaggcgtcacaaactgaatcaggggatcaaatgctcgatcttcaagatgtcaccttggcctttcgtgatgtgacgttttcttatgacaacagcagccaagtgctgcacaacttttcctttacgctgcgccaaggagaaaaaatggcgctgctcggccgaagcggctctgggaaatcaacatcgcttgcattaatcgaaggcgccttgaaaccggactccggttctgtgacgttaaacggagtggagacagcgctgttaaaggatcagattgcggatgcggtggccgtgttaaatcaaaaaccgcacctgtttgatacaagtattttgaacaacatcaggctcggaaacggagaagcaagcgacgaggatgtgcgccgcgccgcaaagcaggtcaagctgcatgactacattgagtcattgcctgatggatatcatacctctgtacaagaaaccggcatccgtttttccggtggagagcgccagcggatcgcacttgcgaggattttgctgcaggatacaccgatcatcatcctcgatgagccaacagtcggcctcgatcctattaccgaacgtgaattgatggaaacggtgtttgaggtgctgaaaggaaaaacgattttatggattacccaccatctcgcgggagtggaagcggctgataaaatcgtatttctcgaaaacggcaaaacagaaatggaaggaacccatgaggagcttctggcggcaaacgaacggtacagccgcctgtatcaccttgatgttcctgtaaaatagaagacagccctaaaaggctgtcttttttgtttgaaaaagaaaagggacaggaaaaataggaaaagaaagcagaggagggatagagatgaatgttccatattggacggaagagcatgtaagggccacgcttcctgaaagagatgcggagagccataaaggcacgtacggtacggctttgctgctggctggaagtgacgacatgccgggggcagcgctgcttgcagggcttggggccatgcggagcggtctcggcaagcttgtcatcggtacatcagaaagcgtaatcccgctaattgttcctgttttgcccgaggcgacctattggcgtgacggctggaaaaaggcggcggatgctcagcttgaagagacgtaccgggccattgccatcggaccgggccttccgcaaacggaaagcgtacagcaggcagtcgatcatgtgcttacggctgattgtcctgttattttggatgccggagcgctggcgaagcgcacatatccgaaacgggaggcccccgtcatcctcacgccgcacccgggcgagttttcccgaatgacaggggtgcccgtgaacgaattgcagaaaaaaagagcggaatatgcaaaggaatgggcggctcagctgcagactgtcattgtgttaaaaggaaaccaaaccgtcatcgcgtttcctgatggagactgctggctcaatccaactggaaacggggcgctcgccaagggcggaaccggtgacacgctgacgggcatgatattggggatgctctgctgccatgaagatccaaagcacgccatattaaacgcggtctatttgcatggtgcgtgcgccgagctctggacggacgagcactccgctcatacgttgctcgctcatgagctatctgacatcctgccccgcgtgtggaaacgatttgaatgataaaaaagctgtcttcagagagaagacagcttttcttgataccccgcccgttttttcagacgcggtttcattaatgcatagtaaagcacagaaggcacggccaagccgataatccatgcgatgtctccgccgccaaacattttggcaagcggtccgatgtaaaagcttgtattgataaacggaatttccagcaagatagacagcacgaacgcaattgtggtgatccaattgacctttccataaggcccgtttacgtcgaacatggctttgacttgatactttccgtggcggacgaagtagtaatcgactaaattgattgccgtccacggaattaagaaataactgatgaaaaagataaaattcaaaaacagctccataaaattgctctgtcccagtaggcttaagactgtgccgacaagcgtgacacccaggatcatgatgattctgactttgggcgtgacttttaatttcagaaatggctccagcgttgttgtcgtggacatgaaagccccatacaggttaaaaacattgatcgccatttgcccaaataacacaatgatcagcataataaacgagaagggaccgaacaattggacaatctggctgcctgagtttgccgtaaagtcaggaagtgaggttgtcagcaatgcgccgagcagcatcatccagatggagctgacagatgtacctgcatagctgtaccaaaatgtttttgaagccggtgttttaactggcagatatcttgaataatcggcaacatacggcgcgtaggcaagctgccacgtcgcaactgcgctgactgccaccaagaaaattggcagatcaatcgctccgggaatccagctgcctgctggaatcggcaattgaaaaatgagaatcgttgcagcaaaaaatacagcaaaagaggtccaagaaaggattttttgcattttgtgaatcaaatcatggccgaaaatggtgagtaaaaaacatacggcgcttaagcctataatgctccatgatcccgggatgggaacaaagctgcttaaggttccggccgccagaatcgtgctgcttgcgaagaaaccaaggtagataaacatgactaagaagaggggaagaatcgctccgattacgccgaattgggcacggctttgaatcatttgcgggatgcctagctgagggccttgcgcggaatgagacgccataaatatggcaccgattaaggttccgcaaataatagcggcaacactccaaaacagattaagtcccattgcaacgggaatcgtgccggtcactaacgtggtgatatgcatattagccccgaaccatacgggaaataaatctttcgctttaccatgtctttcttcattcggaatatattcaatcgttcgcctttctactttcaatgcatcgtcctccatattggatgtttttttgaaatcgacataaagtcatagcttaacagactataagggggtttacaaataaggatatgcagccaaacggccgggaagcctgatctgtcaatggctgaaaagaattgtaaaaaagatgaacgcttttgaatccggtgtcgtctcataaggcagaaaaacaaaaaaggggggatcacggtcattggatacacatgaagaacagcggctgatccagcaggcgaaagagggaaacgacgaggcgtttacagcccttttccactatcactattctttcttatataaatacttgttaaagctttcccttcaccccgatctcagcgaggaacttgttcaggaaacctttctgaaagggtacatccatttaagaagctttcagggccgttcaaaattctccacatggctgatctccattgcatcgcggctctatctcgatcaccagaaaaagagaaagagagaatggaaacggaatcagacagttacggaggaaacaatccgcaagatcaagtgggacgtgtcggcgaaaggggcagagtggagcgaaacgctcgatctgttttcaaagctggaccctaaactgcgcacaccggttttattaaggcattactacggctatacctacgctgaaatcggggtgatgcttcaaatcaaagaaggcactgtaaagtccagagttcataaagggctccagcaaatcagaaaggagtgggacgatgaataaagaaaagctttctgatcatttaaagtcagaatggaaaaaaattgatcaaacagccaatccctctataccgaatcaaaaagaactgcttcaccagctgtcacaaatgaaagctgaatgcagaaaaaaacttcttcaagagatcattttatttgtattctgcgcgctgatggttgtgagtgctgcaatcttagctttcactcaagttcctgctgtgtttattgtgcttcaggtttgtgtgcttgcggtgctgccgattttgattgcggctgagaaaaaaaggcatctcggcgaatgcgaggtgaaacgcggatgacacaaacagaaattatcataacggttgcggcttgtctcatcgtattggcgcagggaatctttttatttattgatgcgaaaaaacgtaatcgcatggcatgggtttgggggattgtcggattgattcaagcaccgatgcctctgatttgttattacttttttgtcattaggccggatcggaagaaaagggggatcaagcaatgaatatttcttgggaaatgattttgccgctgattgtattacagctggctttggcggtgtttgcccttatcagctgtataaaagaagagcggacaaacggtccaaagtggatgtgggctgcaatcattgtatgtatcaatattattgggccgattttgttttttaccgtcggcagaaagcaaaggtaagccgatatgctgtctattgaatcattatgcaaatcgtacaggcatcatgaagctgtaaagaatgtcagttttcacgtgaatgaaaatgagtgtgtcgcactattaggacctaatggagccggcaaaaccacgactctgcaaatgctggccggactgctttcgccaacctccggaaacattaagctgttaggagaaaaaaagccggatcggcgtttgattgggtacctcccgcagtatccagctttttattcctggatgaccgcaaatgaatttttgacatttgcggggagactgtccggcctttcgaagagaaaatgccaagaggaaatcggcgagatgctggaatttgtgggtttgcatgaagcggagcacaaaaggatcgggggctattcaggaggaatgaaacaaagactcggtctggcacaggcactgctccataaaccgaagtttttgatattggatgaaccggtgtctgcacttgatccgacaggacggttcgaggtgctggacatgatgcgtgagctgaaaaagcatatggccgttctgttttctacacatgttttgcacgatgcagagcaggtgtgtgatcaagtggtgattatgaaaaacggtgaaatttcatggaaaggcgagttacaggagctgaaacaacagcagcaaacgaacgtttttaccctttcagtgaaagagaagctggaaggctggcttgaagagaagccttacgtctcagctattgtctataagaatccgtcccaagctgttttcgagctgcctgatatacacgctggccggtcattattaagtgactgtatccgaaagggattgaccgtcacccgatttgaacagaaaacggagtctctagaagacgtctatctaaaggtggtgcacgcatgaaggtgatgatggcgcttttgcagaaggagtggctggaaggatggaaaagcggcaagctgatttggctgccgattgcgatgatgatcgtcgggctgacacagccgctgaccatttattatatgccggaaatcatcgcacatggagggaaccttcctgacggcatgaaaatcagttttacgatgccctccgggtctgaagtgatggtcagcacgctttctcaattcaacacgcttggcatggctctggtcatctttagcgtgatgggcagtgtagccaatgaaagaaatcaaggggtaacagcgctgattatgtcgcggcctgtgacggcagcccattatatcgtgagtaaatggctcatccaaagcgtgatcggcattatgtcgtttgcagctggatacgggcttgcttattattacgttcggctgctgtttgaggacgcatcattcagccgctttgctgcaagccttggcctttacgcgctttgggtgatatttattgtgaccgccggccttgccggaagtacgatattccggtctgtcggagcagctgcggcttgcgggatcgggttcacagcagccgtttcctttactgtttcactatttccagatggtgcgaagtggcttccagctgagatttgcaagcaggcggagcatatccttcttcatggagagcaggcagattttttcggatggtcactcactttctccattctgtgcatcatgcttctggccgtgttttctgtgtggcgcttccggcggtatgaaagctattaattgatcatgttacgtttttgcgcgagcatcacaaaaaaggcggcaaatgccagagacccggctccataaaaaactcccgcaagcccgacaagctgtgcgatttttccggcaagaaggggcccgaggaagatgcctagcgcataaaatgattgataaaaccccatcactgacatttttaaacgggcagaactgatttcgacgacatggcttagcagcagaggaaaaacgaagccgagcgccagtccgatacaggcgtgtgtgatgcaaaccgtgaacaatgcagctgaaaaaggaacgtatagcaaacagaccccggtgacagcgaaactaatgagcatcacgaagtaagcgatacggcttgtaaagcgcagaaacacaaagcttaatgtggcggctgcgtgtgggaggaaaaaggcgctcatcacccaaagaagctccgcgtcgcccattccgagctgattcatgtaaagcggcgtaaaaccaaacactgtgataaataatacggcatgggccgtcatagacaggatggtgaaaagcttcagctttggcagccgcaatgtatctttgatgtactgattgacacgaatggtgccacggtttgcgggaggagcagacggatcctgaataaagcagcagatcaccagacctgcggcagaagctgccagcgccatccaaaaaggaacctgcctccctaaatgggctgcggcgagcccgcagaacacaatgctggcaaactgaggcatgacggtaaaaaactgcatgatgcccattgcttttgatgcattgccattgttgaaataatgtgcgtataaaatggtcgccatcacccacgtagaagcagtgattcccgcgaaaagccgggcggccagcacgaagaagaaagaatcaaacatcagaaaaagcaggctgctgaggacggaaaagccgaacccggcaattaacaattgcttgcgcaaggaaaacaggatgtctgacaaaaggccgagcgggaatcgcagaaggatttgcgtgaccccgtagctgccgagaatgatgccgattgcgccatatgaaaagtgcagatcctccaaatacagactgaatacaggaacgtaaatatagcctgaaaaccagaaacaaaataccatgcataaaaaaacggcgtgatctaaagcgccgattgtttttttctgaggaatcaagtcctgctgtaattccatcgtatctctccacccctttccttccaagtacaacacaattattgaaagcgtttcaatagaaaaataaaaaaacagggcttctaaaaaagccctgttcgctgttgttaatacggatcagacggatgactctcctgttcagcctgctttgcagcctgttccgtttcagttgtgccgatcggcccgttgctgttgttttcggagaccttttttagcccttctgctacgcgttttccgtagtcaggatcagcttttgtgaaattctcaatcatttgatcctgaatttcttttcggcacgtagaaagcgtattcaccaaattcgtaatcaattcgttccgctcaaattcagtaaatctccggtacgtttctccagcctgtccgaagttgtttgttctgtcaatcgcttcacgctttacatcaccttcgacatgcggcgtatggtcttttccgtcttgcttcgcttccttcagcccgcccataatggatggctcgtagttgacgtgcgggttttgtccttctgctctatcgacccgatattgcatttgcccgccttcctggttggtggcgacatgctttttcggcgagttgatcggaagctgcaggtaatttgcgcctacacggtagcgctgcgtatcagagtaggcaaacgtacgcccctggagcaatttgtcgtctgaaaaatcaagcccgtcgacaagcactcccgttccaaatgaagcttgctccacttccgcatggtagttttccggatttttgttcagaaccaatttgccgatcggtttccatgggaaatcgtctttataccacagttttgttggatcaagaggatcaaagtccagttcaggatgctcatcatcgctcatgatttgagcatatacttcccactctggataatcgccattttcaatcgcgtcatatagatcctgtgtggcatggttaaagtttttcccttgaatctcttctgcttccttctgtgtcaggttgcggatgccctgcttcggttcaaaatggtatttcacgagaacggccttgccctcctcattcacccatttataggcatgtacgcctgaaccctgcatttgccggtagttggccggaatgccccaaggcgaaaacaagaaggtgatcatgtgtgtcgcttcaggagattgagaaatgaaatcgaagatacgttcaccatcctggatgtttgtcactggatcaggctgaaatgcgtgtacaagatccggaaatttcagcgggtcgcggataaaaaagattttcaggttgtttccgaccaaatcccagtttccgtcttctgtatatagctttacagcaaaaccgcgcgggtctctcaatgtttcaggcgagtgttttccatgattcacagttgaaaaacggacaaatgccggtgttttcttgcctttttcctgaaagagcttggcccttgtgtatgttgaaatcggttcgtctccgaagcttccgtacgcttcaaaatatccatgtgcacctgctcccctggcatgaacaacccgctctgggatgcgttcccggtcgaagtggctgatcttttcgagaaaatcatagttctcaagtgttgtaggccctctattcccgacggttctcacattctggttgtcagtaacaggatgcccctgcctattcgttaaggtatcctctgactcgtttttcccggatgtcttatgagaaaacgcttcctcgctcccttgggcatttgattggtgctgcttgttttgatgatcatctttcaatggttggccctccttttttgaacggtaacaatattccctgaatggaaagattttaaaacagccgttttttttgatctgcttcgggaatggtacaatgtacaaaaatcggtaaaaggagaggtcgattcgtgacgagagaaaaaaatccgctgcccatcacgttttatcaaaaaaccgctcttgagcttgccccatcgcttctgggctgccttcttgtaaaagaaacagacgaaggcacagcgtcaggctatattgtggaaacagaggcctatatgggggctggagacagagcggcccacagctttaacaaccgccggacgaagcggactgagatcatgtttgcagaagctgggcgggtatatacatacgtgatgcacacccatacattgctgaatgtcgttgcggcggaagaggatgtcccgcaagcagtattaatcagggcgattgagccgcatgaaggccagctgttaatggaggagagaaggccgggcaggagtccgagggaatggacaaacggaccaggaaagctgacgaaagcgcttggcgtcacgatgaatgactacggacgctggatcacggaacagccgctttacatcgaaagcgggtacacaccggaagcaatttcaaccggcccgcgcatcggcattgacaacagcggggaggcacgcgattatccatggcgtttctgggtgacgggaaacaggtacgtgtcgcgttagcatgtttaaggaagaggcaatcaggggaatggttgagaaaaaagaagggagaatcggagctttgaaaaagatgatcaaaaccgttatcaaatgggcgccggtcatttacccgattgttcgaaaaatcatgaaggaccgcaaggcgtctaaacaaaagaatatgtccgcatctagaacagccggctgatcccggctgtttttttataggtcagttttccctctagtcctccggatgttcattgacttgccattctctccattatagaatttatatacatttcgcatcccttcatcatcctttctgcctattcactgaatccctgcatctactagttaggaggtttttctcatgcttcatgggcgactacgtgatattctgcgcttgctgatggcggctgaagccccggtgacaagttcgttttttgccgcgcaattaaacgtaacgacgcggacagtccgcaatgatataaaggaacttcaaggtgtgctaagcggccacggtgcctttgtacaatctgtaagaggctccggctacaagctccgcattgatgacgagcaagtattcagaacactgctgcaagatgaatttcagcaaaaaaagggcctgccggtattgccggaggagagaatggcctatcttatgaaacgtctgctgctggcggaccattatctcaagctcgatgaacttgctgaagaactatttatctcaaaatctacactccaaacggatttaaaggaagtaaagaaacgtctgctgccttaccgcatcgtcatggaaacacgtccgaattacggcttcaagctgcgcggggacgaggtgcagatgaggtactgcatggcggagtacattgtcgatgaaagagaaacggagatagatgttttaaatgaaaaggctgatattttgccaaaagaagaaattgagatcatccgttccgccatcttgaaaaaaatgaaaaacgaccgcatccctctgtccaacatgggactgaataacctcattatccatatcgctatcgcctgtaaacggatcagaacggaaaactatgtatctcttttcccgaaagatatggatcatatcctgcatcaaaaggagtaccaggctgcagaagccatcgtaaaagagctggaatcagcgcttgccgttacgtttccgaaagacgagacggcctacatcaccatgcatctccttggcacaaaacgaatgacacaatcacaatgcggagagggcacattctcaatagaagaagaaaccgatcagctgacacttgccatgatcgaagctgttgatcgtgaactgaagcttggcatcctgcatgacaaagagctgaaaatcggcttggccctgcatatgaagccggcgatcagccgcaaccgatacggcatgaatcttcgaaatccgatgctggcagcgatcaaggaacattatccactcgcttttgaagccgggatcattgccggaatcgtgataaaggaacaaacgggtattgagattcatgaaaacgaaattggatatttggctctccactttggcgccgcgattgaacgaaaaaaaacagaaagcccgccgaaacgctgtatcattgtatgcgcatcgggagccggaagcgcccagcttctgcgcgaaaaactgcgttcccatttcggcaagcggctcgatattcttggaacggctgagtattatagtcttgatcaaatgtcctacgaatcaattgattttgtcatcagcaccattccgattaaaaaagagctccctgtaccagtactgaaggttaacacaatcttaggcggaactgactttacaaaaatagaatctattctgagtgatgaaaaggaaaaagccaatcgctacctaaaaaaagaactcgttttttttcaggaggatctgcgctcaaaagaagaagtgattcaatttttagggcagaaagcggtcgaatgcggctttgccgatgaagaaatcatagattccatttttgaaagagaagacatgtcgccaacgtgttttggcaatctagttgccatcccgcacccgcttgttccgcagacgaaaacaacgttttgggctgtttgtacgctcaaaaaaccgatcgattgggagagtcagcgagttcaatttgtctgtctgctttgtgtcgaaaaggagaacaaagcggatttgcaaagcatgtataaactgcttggcagcattttggatgacccggcggcggtgaaccagctggtcaaatgccgttcgtatcaagagctttcggatgtgtttgaccaaaaaatgctgagctgacagcctgtatataccttttttccgttgcctgcggaaaaaccctgagtgtttatgaaagcgatttcataatatgatgatagcaacagcaggacattacaaaattgatcaaactctagggggtcttttacatgaatatattactcgtttgtgcagcaggcatgtctactagtttactggtgagcaagatggaaaaaagtgcgcaggaacagggaaaagactataccatttgggcagtttcaggcgattctgtacaaaatcatatcgataaagcggatgtattgcttctcggtccgcaagtccgttacatgcttccacagctcaaaaaattaggagagtcaaagggggttccggtagacgtcattaataccgtccattatggcacgtgcaacggggcggaagtgctgaaatcagctgaacagcttggacatgtgtcatagagaggggcgggctatgtgaataaagtcaatcagatcttagaagaaaaggtcatgcctatagcgggaagaattgcgggacagcgtcatttgcaggcgctgcgtgatggtatcatcctcacgatgcccctgattatcatcggttcctttttcctcatcattggcaacctcccgatcccgggatacgctgagtttatggcaaaaacgtttggcagctcctggtctgaaaaactggcctacccagtcgacgcgacctttgaaattatgggtcttgtcgccgcgttcggcatcgcctaccggctcgccgagaaatacggcgttgatgccttgtcggccggagccatttcccttgcggcatttttattagcaacaccttatcaagtgccgtttatgccggatggcgcgacgaaagaaatcatggttggcggcgggattccgctttcgctcatgggaagcaaaggcttatttgtcgccatgattatcgcaatggtgtccacagagatttaccgccttattatccagcgcaatttagtcttcaaaatgccggacggtgttccgccggcggtaagcaagtcatttgtcgcgttaatccccggctttgccgttatcttcctgatttgggcagcccggctgattgttgaagcgacaccgtttgaaagccttcataatattgtaagcgttttattggggactccgctttccattctgggaggaagccttggaggaagccttgtcgccgaagccgtcaaaatgcttttatgggcctgcggccttcacggtgcaaacattgtcggcggtgtcatggcaccgatttggtacggcgcaatggatgccaaccggatcgcattccaagccggtgaggagcttcctaagattttcacccagcaatttttcgatatctgggtcaatatcggcggaagcggcgccacattggcactggttgtcacgatgttcctgcgcgcccgaagcaaacaaatgaagcagctcgggaagcttgcggtcggcccggccatcttcaatattaacgaaccgattatattcggaatgccgatcgtcatgaacccaatgctcttacttccgtttatcatcacgccgcttgtcacagtgacacttacgtacatcggaatgagcaccggccttgtcgccaaaccggcgggtatcgcagtgccgtggaccatgccgccgatcttttcaggctacttggcgacaggaggaaaagtctcaggcgcggtcatgcaagccattaatatcgtcgtatcctttgttgtctactatccattcttcagaatgtgggataagcagaagctgaaagaagaaaacgatctggagccggtccaaacgcctgcagcatcagatgacaaagaagcggctctgtagagaaaggaagtgaatcgcgtgaatgaggaaatggaacaaatcatttttcaaatcatccttcacggaggaaacggtaggagctccgcaatggaggccattgccgctgcgaaaagcggtgacgcagaagaagcgcggaaaaagcttcaagacgctgctgaagaattgtcaaaagcccatcattatcagacagagctgatccaaaatgaagcgggcggagaaaagacggaaatgacgcttctgatggttcatgcacaggatcatttaatgaatgcaatgacagtgaaggatatggctgcagagatcattgagttatatgaaaaaatcaccgagcaaaggggtgcaagcatatgacaaaaggattgaagattgtaacgattggcggaggttcaagctatacgcccgagctagtggaggggttcattaaacggtatgatgagctgcctgtccgtgaattatggcttgtcgatatccccgagggcgaagaaaagctgaatattgtcggcacactcgccaaacggatggttgaaaaagctggcgtcccgattgacattcatcttacgctcgaccggagaaaagcgctgaaagacgcagactttgtcacgacccaattccgcgtcggacttttgcaggcaagagcaaaggatgagcgaattccgctaaaatacggtgtaataggccaggaaacaaacggcccgggaggcctgtttaaaggattgcgcacaattccggtcatccttgagatcgcaaaggacatagaagagctttgcccgaacgcttggcttgttaacttcacaaaccctgccggcatggtaacagaagccttgcttcgctactccaacctgaagaaagtcgtcggtctctgtaatgttccaatcggcatcaaaatgggcgtagccaaagcgcttgatgtagatgtggaccgcgtagaagtccaattcgccggactgaaccatatggtatttgggctggatgttttcttggacggcgtaagtgtgaaggagcaagtcatcgaggcgatgggcgacccgaaaaacgcgatgacaatgaaaaatatctcaggcgccgaatgggaaccggatttcttaaaagcgctcaatgtcatcccttgcggctatcaccgttactatttcaaaacaaaagagatgctggagcacgaactggaagcatcacaaacggagggcacccgcgctgaagtcgtacagaaggtcgaaaaagagctgttcgagctttataaagatccgaaccttgcgatcaaaccgccgcagctggaaaaacggggcggagcttactacagtgatgcagcatgtaacttaatcagctccatttataatgataaacatgacattcagccggtgaacacgatcaataatggtgcaatagcgagtattccagacgattccgcagttgaagtgaactgtgtgatgacgaaaactggccctaagccaattgctgtcggcgacttgccggtgtctgtccgtggcctcgtccagcaaatcaaatcctttgaacgtgtcgcggcagaagcggcagttacaggtgactaccaaactgcactccttgccatgacgattaacccgcttgtcccgtccgatactgtggccaaacagattttagacgaaatgctggaggcgcacaaagcgtatctgccgcagtttttcaacaaaattgaagcgtaaaaaaagccggcctgtaatgggccggcttttttcttatttgctttcagtcagcgctgcgacttcggtcgtccatccgaattcgtctgcgacagcgcctttttgaatgcctgtaatcgtgtcatatagtttttttgcgatttcccctgtttcaccgttgttgatcgaaagtgtttcatcctgccaaatcagctcgccgactggggaaataacagctgctgtaccagttccgaaggcttcttcaaggatgccgtctttatgggcttggatgacctcatcgatcgcaatttttcgttctgaaacttgaaggccccaatgcttaagcaaggcgatgactgaattgcgcgtaatgccttccaggatgcttccgttcagcatcggcgttacgatttcaccgttgattttgaagaagatgttcatgcttcctacttcttcgatgtatttcttctcaatgccgtccagccaaagcacttgggaaaatcctttctcttcggccacctgctgcgcttttaagcttgaagcatagttccctgcggttttggcatttcctgttccgccttttaccgcacggacaaattcactttcaacagcgattttgaccggcttaatgccttctttgtaataagagccgaccggagaaagaatgatcaagagcttatacgtatgagatgccgcaacaccaaggaaaggctcggttgcgatgatgaacggacggatgtaaagggacgtgccctccgcatttggaatccagtctttatcaattgcgacaagctgctttaagccttcaagaacctgttcttcatcaatttgcgggatgcagaggcggtcgtttgattgattcaggcgttccatatttttttccggtctgaaaagcagaacatggtcatcctctgacacgtaagcctttaacccttcaaacacggtttggccgtagtgatagaccattgcagccggatccattgataagggttgataaggaatgattcttggatcgtaccaacctttatctgccgcatagtccattacaaacatgtggtctgtaaacactcttccgaacgaaagctgatttgggtctggtttcggtttttttgttgatgtcaattcaacgcgaatcgtttgtttagtcatggtcaatctccctgctgttaaattgtttatattatcaaacttatttgaaaataattatattctattgtataccttcaacaaataatcgcaataggtttgctcaaatttgtaagaaattcatatgaaaaaagcaggagaaattaattctcctgcgtgttcatttgctcgaataatctgtcataatcggcgcgagtggcatcccgaagaccttcaacacgttcatttgtaatctcctgtttgccttccttcaagccgtccaagaaatattgaacatattcttcagatgaaatgccccggtacgtctggccttgtttatcgcgtgatttttggtttaagcccgtgtccaccataggcggtgccatttcaatcacttccacgctcgtgtcgcggagctggtgtctgagcgtaagcgagaacgagtgaagtgctgcttttgttgcgcagtacaccggataaacagctaacgggttaaacgcaagcccggatgtgacctgaacgattgccgcttcaggctgcttcatcaaatgaggtgtgaaaagggcggataaatggacaggcgcttggaaattaagttcaatttcatcaccgtccacaaaaagatcctctgtcccttttttaaagtcaatttccttttgaatgccggcgttgttgacgagaacattcaagttcggatattcctttaaagcccattcatacaatgcttcccgctgcgaacggtctgcaacatcacattgctttgtatggatgtttgggagctgctgcttcgcttctgcaagacgtgcttcgctgcgtccgcaaatgataacttcattgccgagctccagcaggcgcttggccagttcaagcccgatgccagcagaaccccctgtgattaaaaccgtattgcctgtcatcttcattggatgtaacacctcttaattaagttggctgtgattcctttactatttcaaatcttagcaggaaatatgcagccgcgtcctatgagatgctcaggatgaagtgacttttccggttttataaaattcgtcaattgctttatcgacatacacccagcctttccagccgatgtgaatggtgtctttcatgaaatacgggtcatattcatgccctgagaaatcagcaacctggaagcccttcgctctgatttgtttatttacctttttgtaatagtcagtgcgtccttttttcgggaagcccgtgtaatcgtaccatttcccgttaacaggaatggtgacaaacataggctctgcgcccgcatccttcaggatatcgagcatcatttcaaagtcgccatattccggtgacaccgcatacgatcttcctttgtttttccctttcagcttaggcactttcggcttcagctttttatagacagggttgtcgatgtgaaaatcgttagaaccggagtggcgtttgcctgattgatccgctagtttattcaattcagaccatgacttatcctttactgactgcgagatatagcgctttggcccggatgattctgtcgttgaataatacagatctttcttttccagcatgctgtaatacactttcgccgccggcttcagcgcgttcactttccacgtctgaccgtttaccattgctttgtacagctcagaaagaatggcatcgttttgcacagccttaaagcgaagcatgcgtttcatcattttctttttaatttcaggatcgatctgatcgttaaatgccaaatcaagcccttgcagcgcagaatagttcggcgcgaaatgctgttcatcagacccgcgcttaataaaccattgcggagacacgatgaatacgatttttttgcccttcagctgatccatatgggcagcgaagtttaaagaatgaatcaatgactgggatccgcctttgccgacaaggtatggcgtgaatccctcattgtttacctgaaaataattagatgggtggaactcgtccagccgagaaagctcagaagacccgtaaatcggaagatatgtcggatctttgagcatctgatcttgtaaatatagcccttgaaacatactcggattcaaggctgttgctgactctttcacacgcttatcggtgatgaagcctgtcagccatgaagatggaattgcgatggcgcctgcgaatagaataaacgccaaaataattggaccgaaaaaacgctttttcattatttcaactcagacagctgatttacaatgttgttaggtgtattccaaacgtcccggtcaaattcagtgatcggcactaaaatatcaaaacggttttcaatcgcaagcagcaattctactgttccaaaagaatcaagcaaaccttcttcaaaaatttcaatatcaggattttcctttacgatgtcatcctggcaaacctctgctaaaacgtctaatacctcttgtttaaaatccatagctttctaatctcctttaatggtggtgatgaaatggttttcctgagaaaatgtaaaacccgaggcaaacgaaatggaatgtgatcacaatagcgagaatggttgtccagcggttggacggcagccatttatatttcttattccacttctcgaaaaagttgtaacacgtcatcagcacggcgtgatagaggccgtaaatgatatattgcggcgcgagcccgtgccaaacccccatcagcataaacagcaggaaatacccgatgtttgagacggccatacggtttttgatccactttttcttagtcatccaaaatacgaatctcataaacacataatctctgaaccaaaatgacagagacatatgccagcgattccagaaatctttaatatttttactgataaatggtttattaaagttttctggtgatttaatgcccataatgtagctgaccccgacggcaaacatcgtgtagccggcgaaatcaaagaataaatacatgctgtagccgtacatgtacagcaggttcccaagaatcttattgtgcgtgattgcgggaagattcatgatgaagtacgtattgatcgcgtagccgataataaatttatacaggaaaccgatgaagattttatggattcccgtatacaacaggtcggcgtattcttctttcgtccaagccttctgttcatccttgacgaaccggcggtatctgtcgatcgggccggaggaaatcgtcgggaaaaacaggatgaaatacagcaggcggtgcaatggcagctgttctttcagcagtccgtctcttgcttccataatcagctgaacgcctttaaaggttaaatatgaaatccctaaaaagctgatcaggttatgcggcggatgatgcggctgcgggtgtgaaagaaacggccatatttttgacagaaataaaggcagaatagacgcgataacagccccgcaaaagacaaagccactgttcgctttctgccggtatgccagatagccgctgatcaggagcacctgccatattgtaaacaggcacagcgcgatgaccccgtgtaagtcgtgcgaaaaaattaaagccaatataatgatagatatgaacatgttgtatgcttgaaatctttttccgtttaagccgagaatgatcgtcggcagaagaagaatgccaagcagtataaagaataaaaacgagctgtaaggcgtcatacaagaacctcttcgccaatgcgttttcggtcaattttgccgttagccgtcatttgaatgtgatcctgatagataaattttctcgggatcatatatgccggaagagaagcggcaagctcttttttaatagcgcttgtcagctggaattccttctcgaactcatgctcctcaggcacaatagcagcgatcaggtactcaactgttccgtttggctgataaggaatcacgacagcagagcgaacgtactgtgactgtctgacatggaactcgatttcctccagctccattcgatagccgtgaagtttaatctgaaaatccaaacgtccttggcagaaaatctgaccgtcttgaataaagccggcatcgccagttcggtatgcccactggccttcatgagagaaaaacgctttttccgtcagctctggctcaccaaggtagcctcggcttacactcggccctgcaatgacgatttctcctttttctccatcaggaagcggctgtccctgttcatccataatgaaaatgttcatatctggtttggcgaagcccactggaagcgattcgctgcggctgatgacgtcagccgtaatttcaaccgatgtgacagccactgtcgcttcagtcgggccgtacgtattaaaaatcttcgctttcggaaaacgctcaagcagcgcttttgccacagaaaccggaagaacctctccgcaaaacataaatgtgtccgcatgaggcagcagatcctgtgaaaaacccggatccatcaggcacatttgcacaaaggaaggtgttgatgtccacacattcagtccggacttcttcagctcttcaaataagactttcggcttgttcacagcatcctttgtcacgcaatgtaaagtcccgcctgattgaaggcacggatataggtccatgacagacaaatcaaatgagaacggcgcttggtttaaaaatatttttcctccgctgactggaaagtctgcacaaatccagtctgtgaagctttgaaggttcgcagcggaaatctgcacgcctttcggatttcctgtgcttccggaagtgtaaatgatataaaacgtttcgtgttctttgacccattgatcttggctgacagagccgccttcgttttccagcagttcttccgcagaaactgtctgaatctgctggccgactgcatcaattgagagtcctgctgcatggatcagcaattctgctccagagctttcgataattttcgcaatccgttcggacggaatagacaggtcaaccggaatataaggatgtcccgctttgacacttcccaagaaggaaacaagcatgtgcggctccatgtggccgtacacaaggataggagatttcttttccccagaaatgcgtttttggatcgcggcagccgcgcggtcagactgctcccataattcctgatacgtgagcgactggccttgagagcggaaggcatcggtttgcggataagtttccgcatgtgtttgaatagcatgtaaaagtttcatagttattctctctccaattagaaatcgttataaatatatgaaccggtattcgcggtgtgaaaaccatacataaaaaacaaaacaagcagtatcatcaaataaaagcctgtatgacatgtccacttgacagcgggtttttcatacagctgtttcattaattgcagcatatcaaaaattcccttcccgttttttcgacaatcacatgattatttgacgatcagatgctcaaaaagtttcattttttccctaatctccctcaaattaatatatcggcgtatgtttttgaaaatgaatctttatacctgcaagggcaagaatggaatgtttcgagctgattcataataaaggaaaagatacctggagtcaaaagatctttttaacttttaaaaagtgtaatgtacttaaaaaaatttttctgtacctgttcgttcaagtgaaagcagaaacctaatgaaatcagggcgagaagcgtataataagaaagaaaacgccttcttgcggtatcttgtgaaataagggagaagtcattatgatagataaggaagcaaaaggagttttttattaagctgccggctgaaaaaaagtaagccttttaatagaaaggaagaggaagatgaaccaaacaaataagggtgagggtcagacagcgccgcaaaaagaaagcatggggcagatcctttggcagttaacccgtcctcatacgttaaccgcatcgtttgtgcctgtgctgctcggaaccgttttggcgatgttttatgtgaaggttgatctgctgctgtttttggctatgctgttttcttgcctatggatccagatcgcgacgaacttatttaatgaatattatgattttaaacgcggattagatacagcagaatcagtcggaatcggaggggccattgtacgccacggaatgaagcctaaaacgattttgcaattagctcttgcctcatacgggattgccattttgctcggtgtctatatttgtgccagcagcagctggtggcttgcgctgatcggccttgtcggcatggcgatcggctacctgtatacaggcgggccgctgccgattgcgtacacgccgttcggtgaattattctcaggcatttgcatgggttcggtgtttgtgctgatttcgtttttcattcagacagatatgatcaacacgcaaagcattttgatttccatcccgattgcgattcttgtcggcgcgattaacctgtcgaacaacattcgtgatattgaagaggacaaaaaaggcggacgcaaaacattggcgattttgatggggcataagggagctgttactctgttagctgcgtcgtttgccgtcgcttatatctgggttgtcggcttggttattaccggtgccgcaagcccatggctgtttgtcgtctttttgagcgtgcctaagccggttcaggcagtgaagggcttcgtccagaacgaaatgccgatgaatatgattgtcgcaatgaaatcaacagcccaaacaaatacatttttcggattcctgctctcgatcggattattgatcagctacttccgataataaaaaagaccgctcgtttcgtgcggtctttttttgttacaatcgaccgcattttgtaaaaaaattcatagaaccttgcagcagacagggacgtctagtacatggacagcggataaagttccgttaaaggagatgacgaacatggatttatctgtaacacatatggacgatttaaaaacagtaatggaagattggaaaaatgaattattagtttataaatttgcgctagatgcactcgatacaaagttctcaattatcagccaggaatataacctcattcacggacacaacccgattgaacatacaaaatcccgtgtcaaaagctttgaaagcatcgtgaataagttaatgagaaagggctgtgagattacgacgaaggaaatgaaggagcatattcacgacattgccggcgtgcgcatcatctgttcctttatttctgacatttataacgtcgtgaatgtgttgaagcagcatgaagatttgagaatcgtaaaggtaaaggattatatccagacacccaaaccgaatggctatcgaagcctgcatttaatcattgagatgcctgtgaatttaacgaaccgtgtggaatacgtcaaagcagaaattcaaatccggacaatcgcgatggatttctgggcgagccttgaacataaaatttattataaattgaacaatgacgttcctaagcaattaacagatgagctgaaagaagccgcggagattgcccattacctagatgagaaaatgctggggattaagaaagaagtggattgataacaaaagcgaagcctgacagggtttcgcttttttgctttgcttgctagtactttttataccattataaactcacttctgtttccaggattgaacctgctttatcatgcatgaagaaagggggtaaacatgaaccattccatttcattatcgagaggtttgatttttcttatcgcggtgactagcgggtttacggtagctaatgtctatatcaatcaaacattgctcgtcagcatggcaggcacgtttcatgtgacgccggcacaagctgggatgattgctacattggcgcagattggctatgcggcggggaaccttctgcttgttccattgggagatctttttgaacgccgccgcttaattgtgagcctgctattcttagtgggggtttgttcggtcgcttcagcgttagctgtaagctttccatggctagtcatcacaaatttattattgggattcttcacgattattcctcaaatccttgtgccgtttgcggcaggtttagcaaatgacaggaacagaggaaaagtactcggaaacgtagccatcggcttggtttgcggaattttaggggcgagagtggtcagcggggcgatagatgcccattatggctggcgcgtgatgtattggattgcctgtgcagcagccgtcatcattatgttgatcattcacttctgctttccgaaaagcaaagggacacatgcatttcattacggaaaactcatttcttcattatttccgcttttgatcaaggagaaagtgttaagaaaagcatgtgtaaaccaaggcttcatgttcggcgccttcagtttattttggacgacgttagtgtttatggtgagtgaacctccattctcgtttggcagccagactgccggaacaatcggtttggtgggaattggcggggcttttgcaactccgctgatcggccggattattgatcaaaaaggagttgctttttccaacaagctttgtatgtcttttaccttattgtcatttgttttattaatggcaggccagacttcattgattgtgattgtattgggcgctttattcatcaccatgggcattcaggcgaatcaggtggcgtgtcaggcggagattttccaattgtcggctgaaatgagaagcagattgaatggcatctttatggtcagcacgtttttaggcggcgccttgggatcgtatgcagggggtgcagtctggatgctgtttcattggaacggtgtttgtattctggggatgatcatggtcggtattgccttcagttcaaggattaccataaatcgtactactaaaaaagcgatattggaagggagatagaagctggtgcgaacaagtgaacattataaaaaagggttagatattctgaaacaaattgatgaggagaactatgaagcgatcgtgggcaattttaaacattccatcgctccggaccttggtgtgcttgccgtggagtttaactacggtcagattttttcaagaccaggtcttgatctgaaatccagattattagcaaccgttgctggattgactgcattgggcaatacccagcagctaaaattctatattaacggagccctgaatgtcggatggacacaagaagaactcatagaagtcatgatgcagatgattatttactcaggtttcccgaatgcactgaataccattcttcctgtggccgcggaagtatttgcagaacgaaacaaataatataaaaaccttctcctttttatgtagaatactaataggaaattctatgcagaaggagagtgtgtatgtggacagtatggcagaaaaacggaaagagctaggggagtttttaaaactgaaaagggcacagctttctccgcaagagtttggattgcctatgggcaccagaaggaaaacaacaggcttgagaagagaggaattggcccagctgtccggtataggtgtcacatggtacacatggctggagcagggaagggatattcgggtatcgacacaggtactggaaagcatatcgagagtgctcaaattgaattatgaggaaaaacgtcatgtctttctgttggctggccatcatgttcctttagatgatcaggatgaagataataagagccttcctctggctgtgcggcactttattgatcatttaaccaattgccctgtttatgtgactgacgaaaagtgggacgttattgcttggaacacaccagcttgtgctgtgttcggcaattttggccaaatgggcagtaaggaaaggaatgccatatggcgatgtttcacctcgaaggagtatcgggatctgcttgacgactgggaaagccacgccaaaaaacttatcgcacagtttcgatcgacagccagccggtttcttggggaagcatggataaaagagctgatcgatgagttaactgaaagaagcccggaatttaaaaagtggtggaaccaccacgaagtattaggcacacacgcaggagaaaaagtacttcatcacccggcagccggaacaatggtgatggagcatatgacattacaaatatatgactctcctgatttgaaactgaccatttatcgcccgttagaaaaagaaaatacagttgataaactgaaagctttacttatagacggctaaacagctgattattataaaaaaagacggcaaccaagtgccgtctttttttatttgatattttcaaaaatgtcagatgctttggctttcatttgtttcttaatggtttttggtttcttctctcttttcacagcctcatagactgcggctgtcacaagatcgcctgcttgctggaggcgttctttgctgatatgttcgatcgagtcttcaggggtatgataccacggctcaacttcttctgtttccgggtctccccaaataaagttggcggaatcaatgccggcttcgtggaatggcacatgatcagatgatcctccctgtgtcagagacaggctgtcaaatccaattttttcagcagccgtatgactggattcccaaacatagttagattggccatccaatgtgttgacatacagctcagacgctttttcccagcttgtgcctaccatgtctaagttgaagttcacttcacttcgtttcagctctttttccgatagatgatctacatagtgagaggagccgagcaggccgagctcttcggcgccgaaagcgataaagcggatttctttatcagatggaacgctttttaagacacgcgccatctccagcataacagaggttcctgagccgttgtcatttgccccgggtgaaaaaggaacactgtcgtaatgggccgtcacgtacacaatgtctggatgtttgatgttctttggttttttgattccgatgatattctgggaggtttggtttgtgaatgcttttagttttaaggtggcttctttttgctgggtaagtgcttcgccgtcttctttcttaatgccgacgaccggaatgccgactttatttcccgacaggtttggcgtcataggcacgaggctttctttgttgttataaatgatgacagcttttgctccggcggcttcggcatttttggctttctcgtaataagtcaggtctcctctggaaattaaggcaattttgcccttggcgtcagcggtaaagtccttttgattgcccaatcccgcattgtaaagcggggccgtcagtccttgttcctcagtcggagctgagccggacgccgcttggaggagaatatcgcgtcctgctgaagacagtgttccctcaagccggtcaggaatgttgaatcgttgaaccttcacatcaagctttaattttctcattgatgaggcgatcaatagggcactctttttttcagctgcagttccggctattctggggccgattgcttcacttagctgagaaatggtagagtacgcatgttttgctttgaatggaagctcgcgctcgctatttgatatttgtacagcgtgcgcggcaggggtgacactctgtgccggcaagagcagtgtgccggcagttaaaacagccatcgtcatgacagtcaaaagctttttcatcaaaaataaacctcccctaaatgtatggttggggaatatttcgggatgctaaaggagtttcctgcaagatggagagcgtttttgaaaagacagtgctttatacctgcaaaaaaacgcttatgaatgaagggtcataagcgtttcggaatatcagactattggagctttaaaaacttgcgtttgccgacttggatgatcatattctctcttatctctgctttggtctgaacatctgttattttctctccgtcgatgcgtacacctccgttttgaatcatgcggcgcgcctcgctcttcgaagaaaggagctttagcttgacgagcagatcaatcatcgctatcgttttttcgcctttccagtttacggccggtatatcttccggcaggctgttttcctgaaagactgtcttaaacgagtgttcggcagcttctgctgctttctctccgtgatacattcggacgattgttttggctaaaagcattttggcatcacgcggatgaacggcgccggtttctaagtcttttacgagctgttttttctcttcaagctctaagtctgtcgccaagtggatgtattttttcatcaggctgtcgggcagtgacatcgtttttccgtacatgtcgtttggatgttcgttaatgccaatgtagttgtgtttcgacttcgacattttctcgacgccatccaagccttccaagagcggcataaggataacgacttgtttttctttgttgtatcgttcttgaaaatgccgccccatgaggacattgaaatgctgatccgttccgcctaattcaatatcactttcgagaacgacagaatcatatccctgcatcaatgggtaaaagaattcatgcagtgagatttgtttttgcatggcgatgcgttcttcaaagtcgtcgcgctccatcaggcgggctaccgttattttccctgctaattcaatgacatcttccagattcaatgttttcagccattttgagttatagtgaagctcgactttttctggatcaagaacttttccgaattgctcaaagtaggttttggcattgtgctgaacttcttcatcagtcagttgctttctggctgccgattttccggtcggatcaccaatttttcctgtgaaatccccaattaacagctggacaatgtggccgttttcttgaaattggcgaagcttatttaacacaaccgtatggcccaaatgtacatccggtgcagacggatctaatccgagcttaattttaagcggcgtgcctgtggaaattgatttcacgagctttgcctttaattcctccggcggtatgacttcgtgggcgcctgtcatgtatagctgtagctgtctttctacctctttttgctgtgatgctgtgagctgctcaaatgttatcatcatttttcctccttttttacaaacacaaaaaagagcccatcccgataagggacgtggctcaatgcacgcggtaccaccctggttgaagacatcgtcttccgctcattcgaataacggtttcccgttctttgctacctttaaggttcacaaagaaagctcggggaggtaattcacgtttgctgtgtgccggctcgcaccttccgccggctctctgaaacagggagacaaaccgctactggattcccgtcaaagcttatgttgtatgaagattgtcagctacctttctaagcagccctgtcaatattttctgttcgtccttcgtcattcccgcaatgagctctgtttcccctttgtgaaactccgggtagagttcttcgatcgcttgtttgccggaatcggtgatagagacaaacacgagtcgccgatctcttgtgtcgatgcttttacggcaaaaactctttttttcgagcgttttgatcacgttgcttgctgtagctgtagatatccctgacagctcagcgatttttctcgtttcgagcgctccccatacccatagatcataaagaatggagaaagcggtccaagaaaggttataggaagaaagaacctcagtctccattttgacacggagcctttgtgcagaccgatacagattcgtagcgatcgaaatggcttccaggctaagtgactcgatgggcatttgtttgagcttagaaagtgtatcgtgttcttccttccgaagctgctgatgttgatgtgaacgttccattttttaggcctgccttaaattatcagaatcattagctatgaaacgaattgtagcagagtctggtgtgaacttcaagcccatatatcggttgaataaaaaaagcccaaacaacgccaaaataaacaaaaaaccgcaaacgggggtgcagttttgcaaaaatatgttcaatccgtctataaacatgatccgtttcatctattttcgacagagcatgtagtgacgttagcgattatcgcccttttggccattctgttgtttttgttccaagagagggtcaagcagccgagggccagccggtttttgcgttctctgtttgtgtttcttttgcttggttcgcaaatcggctatcaaatatggatggtcgccacgggcaggtggtcggtgcgcacttcattgcctctccagcttagtgacctgtcggtgtatttgtcagctattatgttagtgacaaaaagcagaaagctgtttgtatttttgttttttgtcggcgtcggcagttcgattcaggctcttgccactcctgacctcggtatgttttcatttccgcatatacgatatatcctcttttttatttctcacggatctgtgtttttatcttgtctgctgatggctgtgattggcacctacagaatgggccagcgctcattatgggtgacagtcctgcttgttaatgtgtacggcgtctgtattttcctgattgatcgctggcttggcgcaaattatatgtatttgacgaaaaaaccgggcggatcctctctcttagatgttctcggaccatggccgtggtatatcgtctcggctgaagccatcacaatcgcaagctttttcattctttattggctttatcgcatcttcaaaaaatgacaccttttttgttgtatcacacattctgtttaaaaaaatgtcggagaacgtgtttatttttttgaaaaagggtatgtaacttgtacaacaaaaagggagatgaataccattgaggaaagatgaaatcatgcatatcgtatcatgcgcagatgataattatgctcgtcatttaggtgggatgttcgtttctttattgactaacatggatcaggagagagaggtaaaattatacgtcattgatggcggaattaagcctgataacaaaaaaagactggaagaaaccactttgaaattcggagtgccgattgagtttttagaagtggataccaaaatgtatgaacatgcggtagagagcagccatattacaaaagccgcgtattaccgcatttcgattcccgacttaattaaggatgaaagcatcaaacgaatgatttacatcgattgcgatgcgcttgtcctagaggatatttctaagctatgggacttagacattgcgccatacaccgtagccgctgttgaggatgcggggcagcatgaacgcctgaaagaaatgaacgtcactgatacagggaagtattttaactcaggtatcatgattattgattttgagtcttggagaaagcaaaacatcacagaaaaagtcatcaactttatcaatgaacacccagacgaagactttcttgtgctgcatgaccaagatgcactgaatgcgatcttgtatgatcagtggtatgaacttcatccgcgctggaacgctcaaacctatattatgttaaagctgaaaaccccatcgactctgttagggcggaagcaatataatgaaacaagagaaaacccggcaatcgtgcacttctgcggcggagaaaagccttggaactccaatacaaaacatccgtatcgcgatgagtatttccattacatgtcctatacgaagtggaatacgattgggaatccggcgatcaaccaataatacagatataaaaaaacgcttttgagatgatcaaaagcgttttttgtttgtctcagcgtgcgactgaccgttggtagaaccgctgaatatgcatggcgatgtagcacaattctttttcaggaaattcaaagccgtattccttcttcacaaaggtgccgatgcttagggcacacaggaaggcatccttaaacttctctttaatgatgtcgatcatttctgcgtccagctcgtaaatggattcgcctgctttgatatgctgaatggcaaagcggagatgggtcacaagccgttcataagagatggtatcttcaacgatattaatagacagttgaatttcgataatctcgataatatcacggatcattgttgtaatatcaagcgtttgtgtcatatcgccggcattgtttcttgctgtgtggatatgcatggcgatattgccgatttcatcatcaggaatgtgaatccccagtttatctttaatcagtgttctggcccataagccgatctggaactcctttggataaaggactttgatttcattcagcagcggatttttgataaccatcccattgctcaggcgttcaattgcaaaagaaagatggtctgaaaaagcgacatgaatgcgctcgttgattttgatgttcagctctttttcggcatgagagataatttgctcagaaatctgaatgtggtcttcaggcaatgtttctaaaatctcttcgaactgcttatagtcagctgtatcttttctgataaaggttttttctatttttgacggatcgacaatatcattcttctttttgttaaacgcaattcctgcacccaagagaatcttctcttcattttgatcttttacgacgatagcattatgatttaagattcttttaattttcatagcttttttgtcctttcatcccccgttttatgaatgaaaacgaataaatccagttattctgtctcttctttaaacccgagaaacaatgtagctataaaagcagagacggctgcgatcaagaaaccgatcatataatgaacaaaattcgcggcgccaaacggcagcacaattgaaatcatcggaatgcctgtcagcccgtaggaatttgccacaacttgtaccgcaaccacgtatgctccgccaatagcaccgccgatggctgctccgataaagggacggatcaatttgagatttaccccgaatacaatcggctcaacaatgcctaaaaacgcggtcagagaagcggggagcgcaattttcttcaggcttgattgtttcgttttgaggaataccgcaagccccgctccgccttgggccacattcgccatcgaccatatcggcactaaaaagttgacaccgacatgcggattagcaagcagcgttgcctcaattgcataaaagctatgatgcaatccagataggacgatggtggagtagatgccgccgaaaagggctccggcggcaatgccggcgtgatcataaatatagacgatcgattgtgtcatgatctggccgatgatggacgcggcgggattcatcacaatcagtgcgaggcatcctgtcaccatgaccgtaataaagggaatgatcacgacatcaagcgacttcggcacaatcgattttaatagcttctcaattttgctcatgacaaaaacggaaagaagaatcggtatcatggaaccctgatagcccatcattgggatatgaagcccccatatgtctaaagaagacggggttttgctgccgagcatagacgggtccagcagatcaggatgcgtcaaaagccctgcaatcactgcccctaggtatgggttgctgccaaattgccgtgcagcactgaagccaactaaaatcggcagtaaaataaaggctgtgctggacacgaggtcgagcattttaatccatgggctgccggcagcgaaccagtgaaacacttttatcatgccgatcagccccatgagcaggccgcttgctgttattgccggaataatcggcacaaaaatatcagatagtgttttcgcaaaagctgcggcagggttcagcttccggctggcttttttctggtggacaggctcttcagaaggcgcggtctcccattcatgaacgacttctttatatattttgttgacgacgcctgctccgaagataatctggaaaagcccatagcggaaaaaggtgccctgcacaccttgcaggttctcaatggcatgtatatcaattttcgtctcgtcctttacatcaaaacgaagacgggtcgtacaatggctgatgctaataatattgttttttcctcctgcgagcagcaataattcttttgcaatctctttctgcaagcaatcaaaacctcctttgctgaagaaaagtcggcttgttcatcgtatcaaatgaaaagttgacaatcaaaatgaaaaaagtgagaaataccggctgaaaatgacaaaaatgctcgcgtcgacgacggagcatgagaataggggttgcccaaggcgccgttatgagcccaacacgaaaagaagagttaaaatgccctgctttttaggcactaatactccctttgcatcattgggtcttgcctgcctgcccagtcacaatcccatatgtggtgataactgtaataacgttcattttatgctgttcatggctgtatagcaatagtatgaaaagcctgtacaatggatgggaaaaaggttgtgtgtgatgttcttagaatgtaaaaaacctttaagacctggaatgcaagtcttaaaggtttttggttactttttcggttcgacggcgttcagccgtttttgcagctttgttttttcatgggatgcttttaattgattcactgcagactgagcggatgtctttgatttctttgttttgtctttttccgctttcttcacttttgcctttgcagtttccactttttttgcttcagccgccgccacctttttcttcactttgtctaaccgtttttgcaatgccattttgtccttgcctgcttgaagctgattgacggctgattgtgcttttgccgcatttgcatcagttgatttcttttcagccgcagatacggattgctgtgccgtcttcaaattggtgctcttcactttgttaaggcgtttctgcagggacgttttttctgaacttgcaggcagcttgccaattgctgattgtgcgctgtccacatctgttttctttttgcttttttccgctttcgcaactttgtctttcgcttgctttgacgcgatgtatcgttttacttggtctaagcgtttttgaaggttctttttgtctgttccgtttggcagcttgttgatggcagtttgtgctgtgtcaacggtttgctgtgttttatatttttctgcctttgcgactttgtctttcgcatcttttacatttctgtatgactgtactttatccagtcttttgtgcagggcagttttggcgtcggagttcggcagctggctgatgagttctcgcgctttgttgatatcgatttgtgcttttgtttgttccgcttttttcaccgcttgctctgctgccgcgtacgctgaatctgttgcctgtgctttatactggattaagccgtagccaaattgctgatcgcggcctgcggtaccaagatcaacgatgtttttccgcatttcctcgcgaagctggacgtttgtctcggcaggatcacgctgttttaacaaggcaaacatggcagcggcgtgcggtgtcgcttgggatgttccgcttcccgttgcataatactggtttaagtaagtgcttgtgatgtttgtccccggtgctgaaaattcaacttcatctccagttgttgaaaaggaggcaagctgattcttttcgtttgttgctgaaaccgcaacgacactgctgtatgccgccggataattcactggcttgccgtttccgtcgttaccgcttgcggcaacaagcagaacaccttgttcatatgctttgttcacggcgtcatgaaggattttgctgtctgacgtcgtgccaaggctcatattgacgatgtccaccccgtttgcgatcgaccagtcaattccttggagaagactttgaagatcccccgagccgttctgatcaagcgctttaaccgcgaatatttgtgcttccggtgcgatgccgtcaattccgtagccgttatgcttggctccgataatccctgcgacatgtgttccgtggccgttatcatctttgtaagaagaggtataactgacagctgaatacccgccggcaatcgacaggtcatcgtggggggagatcccgctgtcaatgacggcaattttgatattttttcctgtcagtcctgccttccaagcctgtttcacctgaatgggctcaaggttccattgctcaaagttgtcagaggtgtcagtgccgtctgacagcactttgaaatccgtgctgtctgctgcggtaaatgatacgttgttttctacatacaaaatatcaggatcctgctttaattcttttactgtctcctggtctgctgtgaccgctaccgcgggaagatgcttatactgctgttcaacatcagcatcactatccaggatggtttcctttccggccttgtttttataaaccacaataacctctttctcgctgctgttttgcgcatgagcgagagggcctatggcgagaaaactgaaaaacagagtgactgatacaacaagtttgcaagacatgtttttcatgattcatctcctttttctatgatgtttgatatatatatcggagaaaaaagagagattaatagttagaaggaaaaaatttttcatagacaggattgtttggcaaaatgcagattttttccgcaggaagaggaaatttccaaatgaatttgtaagcgttttcaaaataagataaagaaaacattgcggaggttgttcacaaagcaatgacaaaagggggcttttaagatgagcacattcactcgggtaatggaagaaaaaataatgcctgtcgccgggaaaattgccggacagcggcatctcagcgctttgcgtgacggaattatcctgaccatgccgctgattattatcgggtctgtcttcttgattttaacgagcctgccgattccggggtatgctgatttcatggcgagtgtgtttgggaaggagtgggctgataagctcggatatcccgtcaatgcttcgtttgatattatggcgatgatcgccgctttcgggatcgcctatcggctggcggaaagctatggtgtcgatgccctttcggccggagcgatttcaattgccgcatttctattggcaacgccgtttgaggtgccgtttacaccggatggctcaacggagtccatcatggtagggggcggaatcccgatcacgctacttggcagcaagggcttatttgtcgccatgctgatcgccttgttttcaaccgaaatctatcggtacattattcaaaaaaatatcgtcttcaaaatgccagacggtgtgccgcctgcggtaagcaaatcgtttgtcgcgctgattcctggctttatcattgtgtttctcgtgtggctggcgcgtcttctgattgaaatgacaccttttcagagtctgcacaatgtcgtaggagacctgcttggcacaccgctttccatccttggcggcagtctcggcggaagcctgattgctgaatttgtacagatgctgctttggtcgtccgggattcacggggcttccatcattggcggaatcatgtcgccgatttggtacggcgcgatggatgccaaccgtcttgccttccaagcgggcgaggcgctgccgagtatttttacgactcagttttttcaaatttggatcaatgtcggcgggagcggagcgacactggcgcttgtcctgacgatgcttgtccgatctcgcagcaaacaaatgaagcagcttggacgattaggaatcggccctgcgctatttaatatcaacgagccgatcattttcggcatgccgattgtcatgaatccgctccttattgtcccatttatcatcgcaccgctcctcacgattaccgcgacttatatcggcatgagcaccgggctggtggcaagaccggccggaatcgcggtgccgtggacgatgccgccgctcatatcaggttacctggcgacaggcggaaaggtgtcgggagccgttatgcagctggtgaatctgctgatcacctgtgccatctactatccgtttttcagaatatgggatcatcaaaaatggcgggaagagagtgcggttgaatctggggataaaaatgtgatgtgatagatgatcagcctgtcataggctgatcatctactttcaaataaaagggaatgttagaatatgtaaaggaggtgcgcatgctagattatatatggttcgatgacgaatcaccgatcttacaacaaatacctgttgaatactcatctgctgctcttattttttctccttttatccaaatgcctgaaggatgggagaatgcaaaaagaaaaaatgattacgagcatatttatccaaacgatgatgaaatcagaggaataggcaaggctgtttcctggaagaaggttatgtcttcttgcggctttcaaacacatgctgagctggcgctggctttaatgacgtcgataggcgctttaagggacgagttcgcgagagaggatttggctgaggtgttacatgaaaacataaatggagacctttattatcccagtgaggatcatatttcaaattttcatagtccgagtttggtaaaggtgttaggtgcgaacggatccaatcggttttattacgcagaaccgattgtggaaaaccgcggcgttttggacataactgaagccaacttgcggacggttcttgatgaagccgcagcagagctcgttttaactgatgagaaaatggattttgtgtttatgagtgtatatgactcattcattaatgtcttcttagcaaaagataaaaacatcaatgacctggttcagcgtatgggctgggaagctatgatttgcgatgagtcaacgtatatcagttggtatagataaaaaaagaacgtacatcacaaaatgtacgttcttttttttatcgctgaaagaactcaatccactcaccgtcagggccttcgatatagaaataacggtatccgtttggaagtgttgtgatctcctcgtcgataaattttgcgttcattttttccgcttttgtatattcagccgcgatgtcatcagtcagcagggcaatgtggtgcacttttccttcagcgggaagctcgctactgtagccttgaatcagttcaatttctgtttccgggccgtcttcaaagccaagaaatgcaagctcgattacaccgttcgtgtgtgtgatgcgatccttcaatttcatgccgagtacctcttcataaaatgtgatggacgcgttaatatctcttaccatgatgcctgtatggtcaattcgttttgccatgctgctcctcctcgtaactctttttgtctatcgtagaaaaacctttcctttctgtcaatgcagacatcttggcgttttgtggtaccataagagaaagcaaacggaaagaggacgacatatatgaagctactcaccctaaaaaaagcacacgctgccaaaataaaaaaaggctatccccttattgaaaaagaagctctcgcagggagtgcggggcacatgaaagaaggagacctcgttgatatcgtgtctgagagcggcggcgagtttctcgcgcggggctattatggcctgcaaaacaaaggggtcggctggacgcttacccgaaataaacatgaacaggttgaccaggcattttttctcaccaaattaacaaaagcggcccaagcgcgcgccaaactatttgaggctcaagatacaacagctttccgcctgttcaacggtgagggtgacggtgtcggcggcgtcaccatcgactattatgacggctacctgctgattcaatggtacagcaagggaatttacacctttaaagacatgctgatttccgcattggatgagatggatcttgattataaagcgatttacgagaagaaacgcttcgacacggctggacaatacgttgaagatgatgacttcgtgaaagggagaaggggcgagttcccgatcatcatccaagagaatggcattcaatacgcggtggatctgaatgaaggcgccatgacgggcatctttttggatcagagacatgtgcgcaaggcgatcagagaccgctatgcaaaagggaaaaccgttttgaatacgttttcttatacgggtgcattctccgtggcggcggcgcttggcggagcggagaaaacaacaagcgtcgacgtggcaaaccgaagtctggccaaaacgatcgagcaattcagcgtgaacaagctggattacgaagcgcacgacattaaagtgatggacgtgtttaactatttttcatatgctgcaaaaaaggatttgcgctttgatctgattattctcgatccgccttcctttgcgcgcacaaaaaaacgcaccttcagcgcggccaaggattataaaaacctgctgaaggaaacgatcgccatcactgctgacaagggtgtcattgttgcctctacaaacagcagcgcctttggcatgaagaaattcaaaggctttatcgatgccgcatttaaagaaacaaacgaacgctacaccatcattgaggaatttacgctgccggaggatttcaaaacgatttcggcatttccggaaggcaactacctgaaagtggtccttctgaagaaaaaataatgaaaaagctgccctgttcaggggcagctttttttatgtagaaatgatctgctggacgcggccaatgcggccatcttcaagacggactttaatgccatgcggatgaaagtttgatttcgtcaaaatatccttcactgtccctctcgtcagttttcctgttttttgatctgctttcaatacaatatcaacctgcaaccctttcgaaatgctgtttcgctcttgcccgttcataacgcacatcctttcttttgttcattatagtcattatggtttaaaagtaacagccggctgatgaagtgtatgtttgtttttttcagccttcattaaatataatgtcaggccaaagcctgctatgctcagaatgccaaaaagcaagtagaccgcgaaaatcgacacgtagtcaaaaatgtacccgcctgcaaatgtgcagaaccagttgccgaacccgttgccaatggcggcgtacatggtcagcgccgtcgcttcaacgtgtcttggggtaatctttttcacatattgaagcgccgccgggataaataaaccgatggccactccctgaagaaagaccgtcgcatatatgatccatagtgaaggcgccgtgaaatagagcgcccacctgaataatgagactccgcctgacagcataatgacgttgagcagccccattttatctataaatgtttgggcaaaccgcataaatggtatttctgaaatcacgccgatgaaaaataaaatgccgatagcggagagagatgcgccgcttttgtccagaaaaagactgaaatacgtattgttcgctaagtttggagcaaatgtcgtaaaggtgatgatcataaagatgaggaaagttttgttgctgataagctcccggaatcctttgcggatattgacctttgtttttgttttctgctggccgggcatttgtgaagccaatatggcggcaatgcacagaaaggcacagccaaagataaagatcacgtgaatggggtacagctggttcgtcacctgtcccatggcaaacaccgcgacaccgaagccgagagagccaaaccggcggattccgccataattgccgtttgtttcttgtgtgtaccttagtgaaatgctgtccgaaagtggaataatcgtgctttgaaaggctgcaaaacaggccgcaatcaaaataaacagagggaaactgtcaaatgcaatataggctaatccaatgatgcctgtgattgatgtgcaaaccgccagcaaacctttcgttttttgcgtatagtcgctcagcatgccccaaaacggctgaaagaaaatcatcacaatcgggcccagtgacatgatcaagccgacctgtgatccgcttaaatgctgttccttcgttaaatacatactgagtaagggaatcatgctgcccgtaccgagaaaagcaaacaaataaaatccttttaacgcggcataatgccgtctcacctgcaagttgtgcatggggtgcctcctttggtatccacaaattacattatattggaattcgccagcttttcaataaggggaagcacataaaaaaaactgcccttgagaggacagttttttcttacataaatgaaagtaaaaacggcgccgcgcaaagcgtcataatcgcagctaagatcatcgacacgctggaaatcgtgccggacacagagctaagctcaaatgcttttgacgttcccgctccgtgtgcgcttgtgccaagcagcacgccccgcgcaatttcgttatcaatgcggaagtaacggatgaccatcgggccgatcactgtgccgaacaaagcggtcaaaataacaaacacggctgtgacggcaggcattccgccgatcatttcagatacgttcatcgcgatcggcgttgtcactgatctcgggacgaggctgtcaattaagccggtgccgaggtgaagccatttcgcaataagagcggtagaaataatcgcgatgcatgaaccgacggccacattcaaaataatttccactgcgtatttctttaaaacagggaaatatttatatagcgggatcgcgaatgccacggtggccggctgtagcatatcggtcagcaatccgccgccgagattataggactcgtacgggacattcaccagcagcagcagaccgactaacacagcgggtgtcaccaatagcggcgacgtataaacacgcggaaagcgttgatataccttttttgctcctaaatacaccaaaaccgttaaaaacaaacttacaattccgatgaacacgtatgctttttctcctttctctttgcaatgagttgtgtaagcgttcctgtagacaccatcacgacaaacgtgctgatgatgacaacaagcagaatgctgacaccaaatttcgacataatgtctccgtattcaatcactccgacggcagacgggataaaaaataaaagcagctccccgagaagccacgctgcaccaagctctatccattcaagcttgataatgttaaagtgcaataatgtgaaaagaatcacaatccctattatactgccgggaatatttatatgaagaagggctgtcacccaattaatcagccgagcaaatataaataacagagcgatttgaataacggttagcaacagttttttcatattgatgcctcccttatatacttattgtacataaggtctcgctataggtaaaatatatattaagaataagaagtattccttttgtctatagaaagggtgaagcacatggatatccgccatttaacatatttcttggaagtcgcccgtttaaaaagttttacgaaggcttcccaatccctttatgtttctcagccgacgatatcaaaaatgatcaaaaatttagaagaagagctcggaattgaactgttttaccgaaacggcaggcaggtggaactgactgatgccggtcatagcatgtatgtgcaggcgcaggaaatcattaaatcatttcaaaacctgacgtcagaattaaatgatattatggaagtcaagaaagggcacgtacggattggactgccgccgatgatcggatcggggtttttcccgagagtgctcggcgatttccgtgaaaactatccgaatgtcacctttcagctagtcgaagacggttctataaaagtccaagaaggtgtcggggacggctctcttgatatcggcgttgtggtccttcccgcaaacgaagatatctttcattcgtttacaatcgtaaaagaaaccttaatgcttgtcgttcacccttcccaccggctggctgatgagaaagaatgtcagctgcgtgagttgaaggaagagccttttattttcttcagggaggattttgtcctgcacaaccgaattatgacggaatgtatcaaggctgggttccggccccatatcatttatgaaacatcacaatgggattttattagtgagatggtatcagccaaccttgggatcgggcttttgccggaacggatctgccgcggccttgacccggaaaaagtgaaagtcattccgcttgttgatccggtcatcccttggcacctcgccattatttggagaaaggaccggtacttgtcgtttgccgccagagcttggctcgaacatacgaaatcgtatttatgggacccgaaaaaagatagtaaaggatgatgcaaacatggatgcacaatcagcagcaaaaagtcttactgctgtccgccggcacagcccactggtgcatagcataaccaacaatgtcgtaacgaatttcacagcaaacggcctgctcgccctcggcgcatcgcccgttatggcgtacgcaaaagaagaggtcgccgatatggcgaaaattgcgggtgcactcgttttaaatatcggaacactgagcaaggagtcagtcgaagcgatgatcatcgcgggaaaatcagctaatgaacatggcgttcccgtcattcttgatcctgtcggtgccggagcaacaccgttccgcactgaatcggcacgtgacatcattcgtgaggtgcgccttgctgcaatcagaggaaatgcggcggaaattgcccataccgtcggcgtgaccgattggttgatcaaaggtgttgatgcgggtgaaggcggaggcgacatcatccggctggctcagcaggcggcacaaaagctaaacacggtcattgcgataactggtgaagtcgatgtcatagccgacacgtcacatgtatacacccttcataacggccacaagctgctgacaaaagtgacaggcgccggttgcctgctgacttccgtcgtcggtgcgttttgcgctgtggaagaaaatccattgtttgctgctatcgcggccatttcctcgtatggagtcgcagctcagcttgccgcacagcagacggctgacaaaggccctggaagctttcagattgaattgctgaacaagctttcaactgttactgaacaagacgtccaagaatgggcggctatagaaagggtgactgtctcatgactcgtatttctcgggaaatgatgaaagagttattatctgtatacttcattatggggtcaaacaatacgaaagccgatcctgttacagttgtacaaaaagcgttaaaaggcggtgccaccctgtaccagttccgtgaaaaaggcggggatgcgctgacaggagaggctcggattaaatttgctgaaaaagcgcaggcagcttgccgtgaagctggtattccgttcattgtcaatgatgatgtggaaatggctctgaagctgaaagctgacggtatccacatcggccaggaagacgcaaatgcgaaagaggtaagagctgccataggtgatatgattctcggcgtttccgctcatacgatgtctgaggtgaagcaagccgaagaagacggagcggattatgtcgggcttgggccgatctatccgactgaaacgaaaaaagatacgagagcggtacagggtgtatctcttatcgaagcagtgcgccgtcaaggcatcagcattccaattgtcggcatcggcggaatcacaatagataatgccgcacctgttatccaagcgggggccgatggcgtcagtatgatcagcgccatcagtcaggcggaggatcctgagagtgctgcacgcaagtttcgtgaggaaattcaaacgtataaaacaggaagataatcgttcattttccttcaaagggctgttctgtaaaaggacagcttttttgctgtccatcaaggttttcagaccttcaaattttaattgacaaaggacaagaactggctatgattatgttatacaatgataatcattttcaattataggaggaacatgatggctcgggggctggcacttattctattcagcttgttgatggttttcggttctgcggcacatgcggaagatgatccgatcgccgcattaattcaattaaacaagcaaatgatcaaatccgtaaaagacggggatatggattcggcacaacaaacgtttgacaccttcaaagcgaagtggaaaaaagaagaaccttctattaagaaagaaaacctttcttctcacagtgaaatggacgcgaatatcgcgatgatttctctttcttttatcaatcaagacgcaggcaagctcaaaacacagcttgaagagcttgcgtctcatttagaaacctatcagcaggctgtcgtgctgaaaaagacatcctcaggtcaatcaagggcgtccttaacagcctatatacaaagcttgaaagacacaaaacagttcatagaaaaaaaacaattggatgaagcgtcatccgcaatcgacaatttagttacatcctggctcgctgttgagggagatgtcgtgtcccaatcgaaagaagcctatacgacatcggaggaaaatctggcgctgatgaaggcggagatcggcagccatcctgaaaaggtatcaaagcaaattgacgaaatgattcaattgctcgagccgatcgcttcaagcagctacagctggtgggatgcggcgctgatcccgattcgtgaaggaatggaggccctccttgtcatcggagcgctattaaccatgacaaaaaaagcgcgggttacgcgttcctcgacatggatctggggcggggcgtccgccggcatggctgtttccttagcagccggcatcggtgtcacggttctgttctcctccagtgtattcggagaaaacaatttcttgcttggcggcgttaccggcgtactgtccgctgtcatgcttttgtatgtcggggtgtggctgcacagaaacgcctcaatggataaatggagagaaaaaatcaatatccagaagtcacaggcactaaaaaaacgaagcctgctttcctttgcgctcattgcatttctggcagttgtaagagaaggtctcgaaacggtcatctttttcatcgggcttgtcgggaagcttccgctcactgaactgatcggcggaactgccgcagggcttatcgttctcgtcatcgtcggtgttctgatgatcaagctcggaatgcgcattccattgaagccgttttttcttctatcaatggcggttgtcctgtatatgtgcgtgaaatttctcggaaccggcgttcacagccttcagctggcgggcattcttccgtctgatgcagaaagctggctgccgtctgtatcggtgctaggaatttatccgtctgtgtacagcacgattccgcaaatgttgattttcctctttttactgattgcgcttgtttcagaagcggcaaaacattttacaaacggaaaggaactgacaaaatgaatttcacaaaaatcgctgtatcagccggatgcatacttgcgctgtgcgcaggctgcggagccaatgacacatcttcaaccaaagaaaaagcttcatctgaaaaaagcggggtcactaaagaaatcaccgcatccgtaaataaaatggaaaccatcatttctaagctgaatgactcagcggaaaaaggagaccaaaaagagattgaaaagaaggggaaagagttaaacagctactggctttcctttgaaaacgatattcgcagcgactatccattcgaatatacagaaatcgaaaagcatcttcagccaatctacacagaagcgcaaaaagacaaaccggatgcagcaaaaatcaagacagaatccgagtcattgaaagcatccttagaagacctgacagaagcgaagaagagcggcaaaaaggctagcgatcagctggctaaagcagcggatgagtataaaggctatgtcaaaaagcagagtggccagcttgtcaaagcgactgaagcatttacgagtgctgtgaaatccggtgatatcgaaaaatccaaaacgttatatgcgaaagcgcgtgtttattacgagcgtatcgaaccgatcgctgaaagccttggagatcttgacccgaaaattgatgcacgagaaaacgatgttgaagaaggagacaaatggacaggcttccataagcttgagaaggccatttggaaggatcaagatatttccggggaaaaggcaacagctgaccagcttctcaaggatgtaaaagagcttgacggttcagttcaatcactgaaattaacccctgaacaaattgttgcaggcgcgatggagcttctgaacgaagccggaatttcgaaaatcacgggagaagaagagcgctactcacggattgatttagttgaccttatggcaaatgtggaaggctccgaagccgtttatcaaacagtgaaaagcgcgcttgtaaaagatcactccgacttgacggaaaaactggatacggagttcagcgaatttgaagttttaatggcaaaatacaaaacaagtgatcagtcctatacgtcttatgataaattaagtgaaaagcaaatcagagagctgagcacaaagctgacgactctttctgaaaccatgtcgaagattgcgaatgtgctataaaaggagttttgtaacatcatgagcgatgaacaaaaaaagccagaacaaattcacagacgggacattttaaaatggggagcgatggcgggggcagccgttgcgatcggtgccagcggtctcggcggtctcgctccgcttgttcagactgcggctaagccatcgaaaaaggatgaaaaagaggaggagcagattgttccgttttacggaaagcatcaggccggaatcacaactgcccatcagacgtatgtctattttgctgccctggatgtaacagcaaaagacaaaagcgacatcattacgttatttagaaactggacaagtctcacacagatgctgacatctggcaagaaaatgtcagcggagcagagaaatcaatatctgccgccgcaggatacaggtgagtctgctgatttatccccttccaacttaacggtcacattcggatttgggcctagcttttttgaaaaagacggaaaggaccgcttcgggctgaaaagcaaaaagccgaagcacctagccgctcttccagcgatgcccaatgacaacctggatgaaaagcagggaggcggggacatctgcattcaagtatgtgcagacgatgagcaagtggcgtttcacgcgctgcgtaacctgctaaatcaagcggtcggcacttgtgaggtccgctttgtgaacaaaggctttttaagcggaggaaaaaatggcgaaacaccgcgcaacctcttcgggttcaaagatggaacaggcaaccagagcacggaggatgacagcttgatgaactcgatcgtgtgggttcagtccggtgagcctgactggatgacgggcggcacctatatggctttccggaaaatcaaaatgttccttgagatatgggaccgctcttccctcaaggaccaagaggataccttcggccgcagaaaaagctcaggggcgccttttgggcagaaaaaggaaacagatcccgtgaagctgaatcaaattccgtctaattcacacgtcagtctagcgaaatctacgggaaaacaaattttgagaagagctttctcttacacagaagggcttgatccgaaaaccggctatatggatgcaggtcttctgtttatcagttttcaaaaaaatcccgacaatcagtttatcccgatgctgaaggctctttcagcaaaggatgcgttaaacgaatatacacaaacaatcggttctgctttatacgcatgcccaggcggctgcaaaaaaggagaatatattgcccagcgtttgctggaatcataaaagaagcctttacaggcttctttcagcgtgtcgacaaaccctcgcattcgttgtcaagcctgtgcgttggtgctcacgaattagagcattcgctccgctccaatgctcggctttcctagacttcaagggttttcaatcacgctgaaaggatgacaaaatcctaaaactttttaggattttgtcaacaatctgaaagaagccttaatcggcttctttatttaaaaaacagttgtaactttaattgttacagtttaaaatcaatttatacgaaaggagattatcatgacagtacacattaaagtttattcagattacgtctgcccattttgtttcgttggaaaagccgcttttgaagaagcaataaaagaaaaggatgttgaagtcgagtggatgccgtttgaactgcgcccaagcccatctcctcagcttgatccggtcaatgatccttccaaacagtacatgtggcagacatcaattcagccaatggcggagaaattaggagtcgagatcaattttccaaacgtctcgccccatccgtatacagacctcgcgtttgaaggcttccattttgcgaaggaatacaataaaggacatgaatacaacacccgtgtctttcaggcgtttttccaggagggccaaaatattggcgatattgacatcttgacgaagctcgccgaggaagtgggattagacggtgcatcatttaaatcagcactggaaacaagaacatatcaggacgtgcaacgccaagccttgaagcacgcttatgaagaggctgacatcacagccgttccaacctttattatcggcgacactgtaattccaggtgctgccggcaaggatgtatttgaaaaagcgatttctgacgaacagaagaaaagacaaggaaaaagctctctataaagagagctttttttattcctgttccatatggacgccagtatgcgccttcacctgaatttctgcaaacgtatcttcatcaattgttttatcagacgacagcaccgttccgagccacgcgccgagaaagccgagcgggatggaaataattcctggattagacagcggaatgagcggatcaccggtaaaaatagcacctccggccgggtcccacacactagggctcatcgataccagcacaagcgcgctgatcaggcctgtcaggctgccccataaagcgcctgaggcattgaatcgtttccagaagactgtaaacacaatcagcggaaggtttgcgctggcggctaccgcaaacgcgagtgcaacaaggaacgccacatttaaggattgtgcaaaaatcgcaaggagaatcgagagtactgacacggcgacagaagcccatctggccgctttcatttgttctttttcagttgcttctccctttctgatgatctggctgtaaatatcatgggcaaatgctgaggcggcagacagcaccaaccctgtcacgacagccaaaatggtggcaaaggcgatggctgatacaaacgcgaacagaaagtctcctccgagcgcttttgctaaaagcggagccgccatatttcccgcttgatcagccgctgtaatcgcgtcaaaaccgacaaatgccgcggcaccaaagccgagaaacaccgtcataatgtaaaacacaccgataatccatgtcgctgacacaacggatgtacgggccgtcttggcatccttaactgtataaaaccggatcaatatatgcggaagcccggcggttcccagcacgagtgccaagtttaacgacaaggtctcaagcggcaccttgtatttatttccgggattcaaaaaatcagcgccaagcggagtagccgttttcatctgctcaaacatggtattgaggctaaagccgaatttcgaaaacacgataatcgaaatcacgagtgtgccggccatcagcaaaacggctttaataatttgaacccagcttgtcgcgatcatgccgccaaacacgacataaatggtcatcagcactccgacgatgaggacagccatagtataatccagccctagaagcagtttgatcagcgcgcccgcccccacgagctgggcgatcatataaaaagtagagatggcaatggtattgagagccgcgacaccgcggattttcttttctttaaagcgagcggcaatcatgtctgccatcgtgtactttccaagattccgaagcggctccgccacgatgtacaagacaacgagataagccaccagaaaaccgatgctgtaaaagaagccatcaaatccatataacgcaatcattccggcaatcccgagaaacgaggcggcagacatgtagtcaccggcaattgccagtccattctgaacgccggtgagcccgccgcccgccgtataaaactcactcgtcgttttcgtccgcttcgcggcaaaatacgtgataataagcgtcaggccaacaatcgccaaaaataataaaaaagcagtcatattcatgtctgttcacccttcagatcctcttttaaagcgcttacatacttatcgaaatgggcggctctccgggaatacacagtactcagtatccaggtcatagcgaattgggcgatggcgaacagccaagcccatgaaacagctccaatggccggtgcattcaaaaaggtgaaataagatgtcaaaacagggagtgaaaaataaaaaacaaaaaagaaaatcgcagaaggaacaataaaagcgcgtttctgctttaaaaaagcttgaaaagacggcgttgcagcaatctgtttataatcagctttgtacatggctttccctccttttattcgctaaacgtaagcaaaaaggtacaccaataggtatgtactgaaagtccgatttatgcgttgaacaatatctggaggatgaaaaaagaaggaagtcgtgaagaggtgaacacagtggtctaaagacaggcgaaggttttcaagctcggccgtgtataaacgagtttgctttcaaaacctcaccgaatgcagcttgttctcagcaaagctgctgtttaccagagcacggttatcatgttcgcatcaccggctgtctgtcgtagttagctgacacaccgtttgtcctcaagctcagcgcagcgatttgcttttgaatagaggatatggtgaaaactcagatcaggtgatagaaaagccagaggtaaatagatccgcctgttcggactagtcttgccggacggtttttttgtggtttttctttctcgatgctgtctcagattctaaaaactgcctcacatcatgaatgcctaatccaatggatctagcttcttgaattaacatatgccaacctttgtccaaatcttttttaacatgagttttcatagtaacctccaattgtataaaatgttttcctgcaacatgcgggcaataaaagacaagccagcgcgatgatgaggcgagtacaacaaatttcacacatagttgctcggtgttcacaaactgaaggaaaaaccacctacctattccctaaaaaaatgactaatataaccaatggaccttatttataataataaacaattaaatactgactggatagtatgtaaatgaaaataaatcatttagcctattaaaaatgacccctgggaaaccgaatagcataaccgttcaaagaaataaataccgctaaagattgatccggtgtaagataagggtaatcattaccgccaggagaaaaatatgaaaaaaaacaaatttcaaattaaaagagaagcaacatttgaaagttttatagacgctggcgtgaatttgttgattgaccgagcgtatgatccggtttctgtagaagatatcagcagagccgccgggtacagcaaaggagcattttatgttcattttgtcagcaaggacgattttctgctgtaccttctcgaaaaacgtcagatgaaaaaaaagatcattatagggtatcttgatcaaatggagcgggagtcagtgaaatcgctgacattggacgaggctgcaaaacacgctgcagaactgctttattcctattacataaataagccgtcgtgggacatcacctcgtttgccatgaacatgccgacatataaagtcttaaagaaatgcaaggcctatgtccggctgtacgaattgtgggtggaagaaaatgtgttatatattaagtggctgaaggagagaaagctgattgacgcctgtattgatcctgaatatacggctaaaataatatgtgcagtcctcgacggaatcatcaaacaatcatatgtattgggccagccagccaccttccgcagctttttagacgcactctcggtattttttactttagacagagagcacgagacgccaagaattttgaaaagtttttcagaaagcgaggaacatcagtgaagtatagagaaataattatgtatatcattatgggggttttcacaaccattgtgaatatcgccagcttttatatattggtagagatcatgaatgtggattacaaagccgccactgtcgccgcttggattttgtccgtgctgtttgcttacataacaaataaattatatgtgtttcagcaaaaaacacatgatctgcagagcctgctgaaagagctcactgcttttttcagcgttcgggtcctgtctctcggcatagatttaggcatgatgatcattcttgtcagccagttcaatacaaatgaaaccttggccaaaatactcgacaacgcggtcattgttgtcgtcaactatgttgcgagcaaatggctcgtctttaaaaaaacaaaagaagaaggggtatgacagaggatagaagcatatgatctgccgttttctatggagaaataaggggaataaaaaataaaaaccagaaaggtgattgcacatgcgggaagagctaaaggggatatttgcaagtgtattcggagaaaaagaggggttacggttttttttcgcacctggaagagtgaatctgattggagaacatacagactataacggcgggcatgtctttccgtgcgcgctgacaatgggtacatatgctgctgttgcagaaagaaaagacggggttgtccggatgtattcagacaactttaaagacgcggggatcaaggaatgcagccttgacgacattcgctatcaaaaagaagacgactgggcgaactacccaaaaggcgttatttatgaatttcaacagaggggatatgcagttccccatggctttgacattgtattttcagggaatattccaaacggggcggggctgtcgtcttccgcttctattgaactgctgatgggggtcgtgctccaaagctattttcatcctgaagtagatgcgctagagcttgtgaaaatggcgcagcatgcggaaaaccattttatcggcgtcaattgcggaattatggaccaatttgcaattggaatggggaaaaaacatcatgcgatgctgctgaactgtgacacgcttgactatgaatatagcaaactcaatgtctcaggcctcgcgctggtcatcgcgaacacgaacaaaaaaagaacattggctgactcaagctataatacgagacgccaagaatgcaatgatgcattgcttgatctgaaaaaaggcctcgatattacagcactgggcgacatcaagccttctgatttcgatgcgcattccagcctgatccaaaatgaaacgaacagacgccgggcaaagcacgctgtatacgaaaatcatcgtgctattaagacggcccatatgttcaaagagaacaatatagatgaaatcgggcagttaatgaaggaatcccacctttcattgaaggatgactatgaagtaacatgccctgaacttgatgagcttgtgtttgcggcatgggatcacgaaggtgtaattggatcaagaatgacgggagcaggctttggcggctgcaccatcagcattgtaaaagatgagttcgttgatgattttattcagaaggttggagacagatatcaagaaaaaacagggctccgagcggacttttatgtcgcggatatcggagagggagcgagagaactaaagggggagtgacatatgagtattattgaacatctggaacagctgcttgagtatggcctggaacgaaaattgatttcgatctgggatcgggaatatacgagaaaccgtctttatgaagcgctgggcatcacacatcccgagccgatctccagcaccagcatcaagcagtcacaaagcctgccggacttgctagctcccatctataaatgggctgcggaaaccggccgaatggaagcggatacagatacgtaccgtgacctgctcagcgcaaagctgatgggctgttttgtgcctgccccgtccgaggtcattcgcaaatttgaagagacaaaagcattatacggcccaaaacaggcgacaaaggaattctatcaatattcagaggatgtctattatatacggactgacagaattgccaaaaatgttcattggacggtgccgaccgaatatggcgagctggaaatgaccattaacctatcaaagcctgaaaaggacccgaaagcgattgcggctgcaaaagagcaggaacagacaaattatccgatgtgtttgctgtgtaaagaaaatgtcggcttcgagggaagcgtgaatcatccagcccggcaaaatcacagaatcattccggtcatccttgaggacgaacaatggttcctgcaattctcgccatatgtctattatccggagcactgcattgtcttaaaaggtgaacatgaaccgatggagatcagcaaaaaaacatttggaaggctgctggcatttcttggccaatatccgcattattttatcggttcaaacgcggatctgccgattgtcggcggcagcatcctaagccatgatcatttccaaggcggcgcgcatgattttccaatggcacgtgcagaagcggaagacgtttatgaattaaatgattatcccggcgtgtcgctgggcttagtgaagtggccgatgtctgtgctcaggctccaaggagacgaaccgggtcatgtcgccgaagctgctgaccatatcttccgcacgtggcagacgtattccgatgaaaaagccggcattgccgcctatacaggcgatacgccccataatacggtcacaccgattgcgcggcgcaggggagacttgtacgaactcgatatcgtactgaggaacaaccggacggatgaggagcatccattaggaatatttcatcctcatcaagaagtccaccatattaaaaaagaaaatatcggcctgattgaggtcatgggattggcgatattgcctggccgcttacaggaggaaatgaaagaaacggcagcggcgctatgctctgctgatccaaaaacagccttagaacaaaatccgctcacggcaaagcatagtgaatgggctcttcggatgatggaaaaaagaaccataacaaaagagaatgcagatctagtcataaaagaagagctgggacatgtattcgctcgcattcttgaacacgccggtgtatttaaacagacagcagtgggaaaacaggccttcagaaggttcatcgatcagttgggcgccaaaccagtcaaaagcctcaaccgctagggttgaggctttttcgatttttatggcaaaacaaacacccaaagcgctgacgcttcgggtgctgctgcttttatcctctttttctggttaacaggcttactagaaagacaacaatggctgcgccgattaccgctggaataatggcaaatccggctaggtgcggcccccatgttccaagcagcccgtgtccgatccaggcgcctataagacctgcgatcatagacccgataattcctccgggcatatctccttttacaaacaggcttccaagccatccgataataatagcgacgataagtgaaataagaaaactcatcatgcaacacatcctattttttatttatttgcttatatcattcctcttttttgtataagataaacaactggatgctctcattaaaaaatacggacagttcagagcatattggctcttcattgcgccttttctttcaatatttgatgcgttaaaatggtaaccgtgtgaaaagatgctagacaaggaaaaaataattcctatctagaaagtttaacaaaatgaaatttttgattgacctaagttttttattgtggtaaaccttaatttgtcagaattagttcttcatcatctttctttactttatatgcggaaataactagaaacttttcatcttaagcgatagatgtgaataaagttggagcaatttttgtcgattttatgacatttaagcgaaaatgggatgaagtttataaaaaaataaagctaataagtgaagtttttgatagcataacaaagtagagaaaagattttgaggaagtatgcacttcagatttattacatcaataggaaggatggtgatcttcttgttcagagcattaaaaccgttgcttgtattagcgctgttaactgtggttttcgtccttgggggatgcagcaatgcttcagtactagatccgaaaggacctgtagctgaacagcaaagtgatttaatcctgttatctatcggatttatgctgtttatcgtcggggtcgtctttgttctatttaccattattttagtaaaataccgcgaccgtaaaggcaaagataatggatcttataacccagaaattcacggtaacacgtttttagaagtagtctggacagtgatcccaattttaatcgtcattgcactttctgtgccaacagtacagacgatatattcgttagaaaaagctcctgaagcaacaaaagacaaagagcctcttgttgtttatgctacttcggtagactggaaatgggtattcagctaccctgaacaggatattgaaacggtcaactacttaaacattcctgtcgaccgcccgatcttgttcaaaatctcatctgcagattcaatggcttcgctatggattcctcagcttggagggcaaaaatatgcgatggcaggaatgctgatggatcaatacttacaggctgacaaagtgggtacttacgaaggccgcaacgcgaacttcacaggtgaacattttgcagaccaagagtttgatgtgaatgcagtcacagaaaaagactttaacagctgggtgaaaaagactcagaacgaggctcctaagctgacaaaagagaagtatgatgaattgatgcttcctgaaaatgtggacgaattaacgttctcttctactcacttgaaatacgttgatcacggacaagacgctgagtacgcgatggaggcgcgcaaacgccttggctatcaagccgtttcaccgcactctaaaacagatccgtttgaaaacgtaaagaaaaacgaatttaagaagtctgatgatacagaagaatgatattgatcaggaaaggaggaagcctgcatgaaattcaaatgggacgaatttttcgtaactggtgacccattaattctgggcgcacaagtttccattgcgctttcaaccattgccattatttttgtactgacttacttcaaaaagtggaaatggctgtggtctgaatggataactactgttgaccataaaaaactcggaatcatgtacattatatctgctgtaataatgttattccgcggcggtgtcgacggtctgatgatgcgtgcccagctagcgcttccgaataacagttttttagactcaaaccactataatgaaatttttacaactcacggtacaatcatgatcatcttcatggcgatgccgttcttaatcggtcttattaacgttgttgtgcctcttcaaatcggtgcccgcgacgttgcgttcccttacttgaacaacctgagcttctggacgttctttgtaggggcgatgcttttcaatatttctttcgttatcggaggttctccgaacgcaggctggacgagttatatgccgcttgcaagtaacgacatgagccctgggccgggtgagaactactacctcctcggacttcagattgccggtatcggtaccctgatgacagggatcaactttatggtaacaatcttaaaaatgagaacaaaaggcatgacattaatgcgtatgccaatgttcacatggacaacactgatcacaatggttattatcgtgtttgcgttccctgtacttacagtagcattagcacttttatcatttgatcgtttgttcggcgctcactttttcacattggaagcaggcggtatgccgatgctttgggctaacttgttctggatttggggacatcctgaagtatatatcgttattcttccggcgtttggtattttctcagaaatcatctcaagctttgcaagaaaacaattgtttggttacaaagcgatggttggttctattatcgccatctctgtattgagtttcttagtttggactcaccacttcttcacaatggggaacagtgcgtccgttaactcattcttctcaattacgacaatggcaatctcaatcccaaccggggttaaaatctttaactggctctttacaatgtataaaggccgaatcagctttacaacacctatgctgtgggcgcttgcgttcattcctaacttcgttatcggcggggttacaggggttatgcttgcgatggcagcagcggattatcaataccataatacgtacttccttgtatctcacttccactatgtgctgatcgcgggtactgtatttgcttgtttcgccggatttattttctggtatccaaaaatgttcggccacaagctgaacgaaagaatcggaaaatggttcttctggatctttatgatcgggttcaatatttgtttcttcccgcaatatttcttggggcttcaaggcatgcctcgccgtatttacacatacggaccgaatgacggctggacaacattgaactttatctcaacagtcggagctttcatgatgggtgtaggattcttaatcctttgctataacatctactacagcttccgttactctactcgtgaaatcagcggagattcatggggtgtgggacgtacgcttgattgggcgacttcttctgcgattccgccgcattacaactttgcggtgcttcctgaagtcaaatctcaagatgcattcctgcatatgaaagaagaaaaaactgaattataccctgaaagtaaattcaagaaaatccatatgccaagcaactcaggcagaccgttctttatgtctgttgccttcggtcttgcaggctttggacttgtctttgaatggtactggatgggcgtagtcggattgatcggagtcctgctctgcatggttctgcgttcattcgaatacgacaacggctactacattagtgttgatgaaataaaagagacggaaagaaagatttccgaataaggaggcgtgagttatggaacatgcagaacacggcaattctaacgcgcctatggaatatcaatctgaaaccggcagacttaatattctcgggttttggatctttttaggggcagaaattgtgttgttctcaacactatttgcaaccttcttcgttcttaaaaacagaacagctggaggtgtcttgccagacgaactatttgaagtcaatctggtaatgattatgacgttcttgctgctgatcagcagctttacctgcgggatcgctgttcatgaaatgcgccgtggaagtttaaaaggcgtagtcatttggacaattatcactcttcttctcggtgccggcttcgtcggatgcgagatcaacgagtttgttcactatgtacatgaaggagcggctctcagtacaagtgcgttctggtctggattctttgttttacttggaactcacggaactcacgtaacaatcgggattttctggatcacaggaattctgattcagttgaagaaacgcggcttaactccgcaaacttcatctaaaatctttatctcaagcttgtattggcacttcttagatgttgtatggattttcatctttacaggtgtctatctcatgggattggggggtctgtaaaatggcaaacaaatctgctgaacacagtcactttccatggaaacacattgtaggttttatcctgtctatcgtcttgaccctgctggctctatgggttgcagtgtatactgacctgagctcatcagcaaaactttggattatcttcggcttcgccttcattcaggcggcgctgcagcttctcatgttcatgcatatgacagagagcgaaaacggcacgatccaagtcggaaacacgctgttcggattctttggcgcgatcgttatcgtgcttggatccatctggattttcgcggctcactatcaccatggtgaccatatggacggaaatcctcctggaggcgctgaacactcagagcattcaggccataacgaataatacaaaaaccctcttcattggaagagggttttttgctgtcttcagctgcttcgctttctgcgaagatacggaaggccgtaaatgataaatgcggcgatatgagcgacaatgacgttgacggcaaacaagataatcatgagagtgtgtccaagtggagaaaggctttctgttgcgtaaaagaagaagaatacccacattaagatgattggcggaatagctgagagtgcgacttttttgttatcaagccaaataaagagaggcgttgcgctggcaaccaataagtaagcaaaaaacatgtccatcatacccgtctcctttcattttgtgataacgtttacaaaaatgaaatagaggaactgagttgtgtctgttttgtgattgttttttgaacattctgttacaattattataccatgttttccagaaattgatacgtgtttttgcagaaatggactggatctatcgtcttatttttaaacgttgtaagataggagaatgtacggagctttctttttaaaagaagggggatgcagatgtatcaggtaataaagcttgaaagagaagattggcgagaagtgatccgcatgtctgaatatgcttttcagaaagaacttagtgttgaggaacgagaagagaaagtaaaagctttagagaaccattacatcatcggaatcaaagaacaagagaagctcctttctaagcttcacatcattcccttttctgtcatgctggaagagcaggagatgaagatgggaggtattgccggggtagcaacctggcctgaatacagaagaaaaggaacagtaaaggaacttattctagacgctctaacggttatgaagaaaagaaaccaaaccatcagctttttgcatccgttcctgatctccttttaccgcaaatttggctgggaactctgtttctatcaaaaacgcctgacttaccttaaagaacagtttcaaaaactaggcgatgcccctggggacgtgaggaggcttcaaaaggatgaaacagatgcagtgaatgccatctataatcagtacagaacgaagcataatgggctgatgaagcgttcaaaggagcattggacagagaagatccatggaatgaaagctatgtacatctctgaagatggggtgccctgtggatatcttgtgtatgccatcaaaaataaaacgatgcgagttgaggaatttgtttatttgaacagagaggcacagagaggcttgtggaattttatttgccagcatgattcgatgctaaatgaagcggaactgactgtacggatggaggaagatcttgattttttaactgccgaaccccgggtcaaacaagagatatatccttatagtatggcgcgcatcgttgacgttgaaggttttttacgggaatatccaaaatctcgggtaacagctccctttgactttaaggtaacggaccaatgggcaccgtggaatcaacagactttccgcgtcgattcgcagcaggtgcagatcgttccagaagagtcatctgaccatctaatagaatgcagcatatcttctttaaccgctttcttcctaggcgccagaagtgcccgtttcctttttgaagcaggcatgataaaagggccggtatcggaaatcaaacggcttgatgacgactttcaactaaaacctccatttcttatggatttcttttaacccctaatttaaaaggggtttttttatttgaaaagttttgtgtcaatcgaaacatttcggtttatgatacgtcatatttcgtgtagctgaaaaagcgccgcaaatgctgaaaaaacataaaaggaagcgagcttcacgtgtcatcttgaacgtggttcatgtataataaacattagtgattttccgatgaaaatgtaaggcgggatagaatgagtcgatataagaaacagcaaagccccttttaccagggggatttgatttttatatttggtgtgttttttattataagcgtagtatcaatttatgctgccggtcagtttgggcagtatgggaacacggattggattcagcaaattgtgttttattttttgggggctgttgccattacagttcttttgtactttgatttagaacagcttgaaaagttaagtttatatatttttatcattggtattttatctttgattattcttaaaatcagtcccgagtctattgcacctgttattaaaggggcaaaaagttggtttaggatcggtagaataacaatacagccgtcagagtttatgaaggttggtttgattatgatgcttgcttcagttattggaaaagctaatcctaaaggagttcggacgcttagggatgatatccacttgttattaaagattgcgggtgtcgcagttattcctgtaggtcttatcctgatgcaggatgctgggactgcgggaatatgtatgtttatcgttcttgtaatggtttttatgtcaggtataaattggaaattgattgcgatcatagctggttcaggtatcttactcatttcattaattttattagtaatgataaactttcctgacgttgctaaatcagttggaatacaggattatcaaattaagcgggtcacttcttgggtgtctgcttcaaatgagacacaggaagattcaaatgacagctggcaagttgaccaggccatcatggcaataggatctggtggtattttaggtaatggtatttctaatttgaaggtttatgttccagagagtacgactgactttatcttttctataataggtgagtcatttggctttataggctgtgcaattgttgtcatcatgttcttctttttaatctacaggcttgttgttctgatagacaaaatacatccgtttaaccgtttcgcttctttcttttgcgttggctatacggcgttaattgtgatccacacattccagaatatcggaatgaacattggcattatgcctgttaccgggattccgctgctgtttgtcagctatgggggaagctcgacactttccacgttaatcggatttgggattgtatataatgcaagtgtgcagctgacgaaatacagaagttatctttttaattcttaatatgcagacagcctttacagaggctgtctttttttgtgcagagcatttcacttttgagatcactttttttcggatatgataaaaagtgataaggaggtttttgtgatgaataacacaatcgaaaccattttgaatcatcggtcaatccggtcttttacagatcagcttttgacagctgaagaaattgatacattagtgaaaagtgcgcaggctgcgtctacatccagctatgtgcaggcatattcgattatcggggtttctgatcctgagaaaaaacgcgagctgtccgtgcttgctgggaatcagccttacgttgagaagaacggacacttttttgtattttgtgcggatttgtaccgccatcaacaactggctgaggaaaaaggtgaacatatttctgagctgctcgagaatacagaaatgtttatggttagcttgattgatgcggcgctggcagcgcaaaatatgagcattgccgctgaatccatggggcttggcatttgctatatcggcggcattcggaatgaactggacaaggtgacagaggtgctgcaaacgcctgaccatgtgctcccgcttttcggactggcagtaggccatcctgcgaacctttccggcaaaaaaccgagattgccaaagcaggccgtttatcatgagaatacgtataatgtgaacacagacgatttccgtcatactatgaatacgtatgacaaaaccatttctgattactatagagaaagaacaaacgggcagcgggaagaaacgtggtccgatcaaatactgaactttatgaagcaaaagccgcgtacgtatttaaatgactacgtgaaagaaaagggctttaataaaaactaaagcaaacctctccgtctggaggggtttttatgtttcacgtgtaacatattccgacaaatagggacaggctttcacaaataaatggcgaatgataggggacactgataagcagtgtgagcggctttggagaaaaaatagaagatcagtgatacgatgaggatgaggtggtagggatggtttcattaagtatattagatcaatctccagtatcagagggcagcaatgcagaaacggccttacagcaaaccgttgcgcttgcccaagctgctgagaaccttggatataagagattttgggtttctgagcatcacttttcaaaacggctggcagggtccagtcctgaggtgctaatcagtcatatagcggcgaaaacaaagcgaatccgtgttggatcaggaggagtcatgctgccgcattacagtgcttataaagtagctgaaaactttcgtgttctggaggggctgacaccaggaagaattgacctggggcttggcagagcaccggggggaatgccgattgcatcatgggcgctgaatgacggtggtaagcgcaatgctgatcagtatccgcagcaaatcaaggagctgaccatgtatttgcatgatttggcggatgacaaacaccgttttccgaatctgacggctgcgccgcatattgcaacagctccggatgtgtggctgctcggctcatctggagaaagcgcgttgctcgccgcggaatctggcgctggctatatgtttgcccattttatcaatggagagggcggagagggtactgtcagacagtataagaggcgattcaaaccgtctgtgttaggagatacgcctcgagcggcagttgctgtttttgttctttgtgctgacacggaggagaaggcagaggagcttggggctgtgcttgattttacacttttggcgggagagcagggtattcctttagagggagttccttcgtatgaagctgttcggaaaaatacgtattctccttatgaacagagacgaattgctgataatcgaaatcgaatgattgtcggtacgaaagaacaggttaaggagcggctgctagctttgagtaaagcgtatgaaacagaggaaatcatggtggtgaccatcacgcatcattttgaagataagctccgatcgtatcgattattgcaggaggcgtttgctgactgatctttaaaaagccctgccgattcggcagggctttttcttattcaacagtgaaaggttcttcggtcaaaacctggcttgacttgcctttgtttgcggcatatgcgagcaagtaatactctccggccggaagtttggttccgccattaatcgtgccgtcccagtcaaagtactggtaacctttatcttggtttttataaatgccggcttggcctgcgaaatcaaggttgctgtcatagacgagaaacgccagctcttccgctcccgcaggaaggtaggtttcaatttgataggtaccttgtacagacccttcgctgacggagacagatgtgactctcggataatcgggctctttcacaatcagcaatgtaggtaccttagcgaccgtttttccgccttctctgacgataaccgttccttcatagatgccagcttttgttttcttcgtattgacctttacttttgcagtggctttcccggtttgatgtgccggaatcacaacacggcttgtgccggatgtggagatgccgctgccattaaatgagtattccagtgtgtatgactttctaatggaagattgattttcaatcgtaaacgtttcattttttgtttcgtttccgttttccttcaagaacgtgccgtatgaatagcttccaggtgagacgagcgaatcggctttgattgcgttcatgattcttgcgctgcctgcgccttgagcgttatgcggatatacttccccatcgctatcctttaaagtgacagcggtattcatgatggcggctttaatctgttcaacgctccactttggcttggcttgtttaataacggcaaccgctccggcaatatgaggcgatgccatgcttgttccttgttttgatccgtagccgtatggatggtcaggatcgtgtgttgggatcgtgctcacgatattgacccctggcgcggaaatatcaggcttaatcatccacgtatccataacagggccgcgtgatgagaaatcagccacttgttcaccgagcgcttttgagaccgtcaacttgaatgttgtttttgtctcagcagctttcagggcgctgacgagtttttcgccgtcttctaatgaaagcttaatcgttgggacagacatgcctggcacattggcttcaatttctccagagaggttgttatacacaaccatgccgatggcaccggcttttttagcgttatccgctttatccacaaatgcaatgctgcctcgtttgacaacggcgactttgcctgtcaggtctttcccttcaaaatccttttcttcgccgattcctgcttcgacaagctcaatttctttgttattgagcgctttgacgtcgtcctctttgttgtagcccatcacttttgctgaagagtaggagccgaaagtgacggcgtattcattgagcggcagctgagtcgcaccgacagaaatcgcttctcttgatgtgcccggcgatccgactgtccagccgttcggtccgctgttgccgtttgaggtaacagcgacaacgccttctgacatggcccagtcaagcgctgtgcttgtcgcccagtccgggttgtttaaagagtttccgagagacaggttcatcacatctgccccgtcctgcactgcacgttccacaccggcgatgacgttttccgttgtgccgcttccgccaggccctaacacacgataagcaagaagtgtggcatcaggcgctacgcctttaattgttccgtttgcagccacagttccggctacgtgtgtgccgtggtcagtcgctccgcccctcggatcgcctgttggtgtttcttttggatcgtaatcattgtccacaaaatcgtatcctttatattgtccaaagtttttctttagatctgggtgattgtattcaactccagtgtcaataatcgccaccttgatgccttttcctgtgtagcctaaatcccatgcatcgtttgctccgatataaggcgcactgtcatccatttgcggagatacggcgtcttcggagattgtgacgtctttatccttcatattgtctgttttatatgtgacgttcgggtacactgccttaacgtcttttaccgcgagaagttttggaatctcattagctggaagcttcatagagaagcctgaaaatacctgctcatattcccggtttacttttccgtttttcaccgctttgattgctttgttttttgcttttgtgcgagcggttttcagcttgcttttcgattggctttctcccgcttccttcgcttctgccaaggatttttcttttaattccactataacggttgtttttttgcttgtcgtcatgtcgatatcaccgaatacctcggctttttccagatcagccgacgtttttgaagaagccggagctgcctgaacgcccgtaatgcctgtggataacgcaaaaaataagacgaaacttacaagcagaaagcgaatgatcccctttttcaatgtgtttccccctttgtatttagaaaaaatgtgaaagatctagtatatatttcttgaaaattcaaaaaaatccttgtgtcatttggaccatttattggattttgtttgtgtataacgaaggagttatacacagaaccctgtgtataagtgaataaacctgtgtatatatatagttaggaatatacgttcgtatacaaaatatagatagagtttgtggacatgtggatatctcttgtgattaagttgttcttatctttgggataacttgtgtataaagttttcaaagcggttctccaattttcatttcaattctttcagctttcaacaaaacttctaaaaactagttggttttttcactcatattgtgacaaagaattctctttccacggtctatcatagagtcatgagttttgctagagccgctagtttgcgagaaaagaaatcggccgtcttttcctgcgggctgcggctgagaaaacgggctgctaaaaaggctgcctgccaaaaagaagcggagggatgtttttctatgaaacgtttgcttgtatctttacgggtgtggatggtctttttgatgaactgggtgacgccggacagaaaaactgcggctgctgcggtctattcggctcagcgtacataccaaagaaaggcggctgtgcaggccgcaggactcgtttcgttttatgagtggcggatggctgtgaatgaggaagaaaagcagaaagcgaaagccgccgcgctttataaaagaagatgtttgcaagccttcaaggaatcgccaaagcaggagagagcgggcccgcatctttacatggcggtcaaaaggaggtaaaatcccagtcaaaagcaaattggcgggagagataacctcttgaaaatctataaagtattaaacaacaatgcggctttaataaaagaggatgatcaggaaaaaatcgtgatggggccgggaatcgcttttcaaaaaaagaaaaatgatctcatccctatgaataaagtggaaaaaatctttgtcgtgcgcgacgagaatgaaaagttcaaacaaatcctgcaaacactgccggaggagcatatagaaatagctgaggatatcatcagctatgcggaaggagagctcgcggcgccgctgagcgatcacattcatatcgcgctttccgaccatttgtcctttgcgatcgaaaggattcaaaatgggctgcttgtgcagaataaattgctgcatgagataaaggcgctctataaaaaagaatatgagatcggcctgtgggcgatcggacatgtaaaagagacattgggcgtgtctctgcctgaagatgaagcgggttatattgcccttcacatccatacggcgaagatggatgcggagagcatgtattcggcgctgaagcatacaaccatgatcaaagaaatgatagagaaaatagaacaatactttaatcgaaaggtggatgaaaacagcatttcctatcaacgcctagtcacgcatttgcgatacgcggtcagccggttggaatcaaatgaagcgctccatcgtatggacgaggagatgctttatttcatccaaaaaaagtattcattcgcctatcaatgtgcgctggagctggcggagtttttgaaaaatgaatatcaattacatttgccggaatccgaggccggctatatcacgctgcatgtccagcgtcttcaagatctctcggaataaccgctttgacttgcagggagtgatctctggaagtttttttattgatcaggattcagtgtgtagtacatccagcccatcataactattcccgcggtcagattgccgagcgtaacggggattaagtttctgactgctcccatcagtgtcactgtatcagggtgctcaatcaaaagcgagatggcgaatgtgcacatattggcaatgctgtgttcaaagcctgaaataaagaagcagaaaacgaaaagcatcatggtaaaaagctttgctccttcccctttgagagacattggaatgaaaaaggcgaggcacacaagccaattgcacagcattcctctgaaaaacaattcggaagccggcggctccattttgtgctctgccaaatgaatcaaaaaggaatgaacagaaggctcctcaaaaagtcccgtcgcgctgatcaggatggcaaacagaatggcgccgattaaattgccggcatagcttgacatccacaagtatagggtgttgcgccagctgagttttttccggagcgcggtataggtgaaataaaaggtgttgccggtaaataaatctccgcctccgtaagcaatcatcagaatagcggccccgaaagtgacagcggctgccggaaaggcaaacggagaatcagccataaagaaatagctgcctgttttgcttgcggctgtaatgccaaaaccaataaacatactggccaaaatagaccgaagcacataacggattttgcttgaagcgaatatgttttgttttttcaaagcatactgttcaaccttttgcaatgcttgagtttccattgttttttcctgctttcattcatgattgagcatagtatagcacgatattgtgaagtatttcacaattaatttttacgaatttttgtctacatgttatatcaaactatttaactaaaaaaatagttgacgaaaacgctgtcatgatttatgatgaaagcgtattcttaatctgaataagcgggattgtgactggtaaagcaggcaagacctaaaatttgcgtaaatgaaaaaggatcgctgtgtcctttattcgttggcgaattttaggtcttttttgtttaaataaaagggggagaaatagatggattacaaagagactgcaaaacgcctcattgagcttctcggagggaaagaaaatatcatcagcgcggctcattgtgcaacaagactgcgtttagtgatgaaagatgaatcaaagatagatcaagcacaagtagaagagcttgatggcgttaaaggggctttcagcagctctggccagtaccagatcattttcggaacaggccttgtgaataaagtattcgatgctttttctaaagaagctgatattgagcgtgaggaacacgtcaatcatcaggatgcggcaaaagaaaagctgaatcccgctgcgagatttgcgaaaacgctttctaatatttttgtcccaattatcccggctattgtggccagcggcctgttaatgggattgctgggtatgatcaatgcgtttcattggatgagcaaggattctgcgctgttgcagctgcttgatatgttttcaagtgcagcatttattttcttgccgattctaatcggagtaagcgcttcaaaagaatttggcagcaacccgtacttgggagcggtcattgggggaatcatgattcatccaaaccttttgaatccatggggtttggctgaagcgacacctgattatatgcatcttttcggatttgatatcgcgcttctcggctatcagggaactgtcatccctgttctgctggcagtttatgtaatgagcaaggtagagaaatggacaagaaaagtggttccgcatgcggtagacttgcttgttacaccttttgttactgtaattgtcaccgggtttgttgcttttatcgcgattggccctctgggcagagcgcttggctccggcattacggttgctttaacttatgtatatgaccatgccggttttgtggcaggtttgattttcgggggcacgtattcactcatcgtgctgacaggtgttcatcacagcttccatgcgattgaggcggggcttattgcagatataggcaaaaactacttgctgccgatctggtcaatggcgaatgtcgcacagggcggggcaggtcttgccgtcttctttatggcgaaaaaggcaaagacaaaagaaatcgcgcttccggcagcattttccgcttttctcggcattactgagcccgtcatattcggagtcaatcttcgctaccgaaaaccgtttatcgccgcgatgatcggaggcgcattgggtggggcatatgtcgtctttacacatgtagctgcaaacgcttacgggttaacgggaattccgatgatcgccattgctgcgccgtttggcatgggcaacttgatcaactatctgattggcatggcgattgcggcagtgtcagcgttcattgcagcatttgtcatgaagattaatgaggatgaggagaggaaaaaatgacagcacatgaccaggagcttcgtcgccgggcttatgaagaagtggagaaaaaagagcccatcgctaacagcgatccgcaccgccagcattttcacatcatgccgccggttgggctgctgaatgacccgaatggcgtgatttattggaagggcagctatcatgtattctttcagtggcagccgtttcagacggggcacggcgcaaaattttgggggcattatacgacacaggatgttgtgaattggaagcgggaagagattgcgctggctccgagtgattggtttgataaaaacggctgctactcgggcagcgctgtcacgaaagacgatcggctctatctgttttacacaggaaatgtcagggatcaggatggaaatcgggaaacgtatcaatgccttgctgtttctgacgacgggctgtcctttgagaaaaagggtgtcgtcgcccgccttccggaaggatatacggcgcattttcgcgatccgaaggtatgggagcatgaaggcacatggtatatggtgattggtgcgcaaacagagaatttgaaagggcaggctgtattgtttgcttctgataacctgatagagtggagatttcttggcccgataaccggcgcaggcttcaacgggctggacgattttggatacatgtgggaatgccctgatttgttttcccttcaaggatcggacgtgctgattgtttcgcctcaagggcttgaggctgacggtttcctttatcagaacgtataccagtcaggttattttgtcgggcgtctcgattataacaagcctgaactgaagcatggtgattttagggaacttgatcaaggttttgatttttacgcgccgcaaacacttgaagatgatcagggcagacggattttgtttgcatggatggctgtgcctgaccaggatgaaggatctcatccgacgattgactatcactggattcactgcatgacgctgccgagacagctgacgctttcaggccagaagctgattcagcagccgctgcctgagctaaaagccatgcgcagaaatgagaaaaaaatacacatcaacatgcatggatcatctggtacacttccagtggaaaaacctgaaagagctgagattctgctggaagacattcatacggagtctggcttttcaatcagtatccgcggaacggctacgttttccttccataaagacgaggggattgttacgctggaacgaacgagctttgacggaaaaagaacagaagcgagacattgccgcatcaaggacttgcataccgtacacatgtttttcgacgcgtcatctgtggaaatctttatcaataacggagaagaggtctttagtgcgagatattttcctttcccgggaaatcatgaagtaacagccagttcgaccgggaaatctgaaatgaatgtcggaatttggacacttatgtagaaaatccttctattttcttatgtgaaatctgagccatctgtgctattcttcaacgataacctactatttttttctgtaaaaggagttgttttcttgaatatacatgaacagaagataacaccggaatgtttggaaaaggctgctaaccaagttgaagataagcgggaagaatataaggatgtgctgcttcagctgaaaaaaatgcttggcggaacaacgccgcacagtgaaacggcggaaattctcacgcgggcatatgaacaaatgaaggaatatgcactttttgttcagtcgatagaaacatttttgaggaaatctgcaaacaatttaaaaatcaaataaacaggctgccgatgggatcggcagttttttctgtgaaaagtcttcggtgatttaaaaagggctgcctctttgtaaggcagccccttttgtttatgattgttgattcaggcgcagtgcagaatgcttcgtaggaccaacatactggtttagcgggaaggattctttaatggccgctgtgatgaattctttcgctgcgtaaatggcttctttgacttccgcacctttggcgagctccgctgtcacggctgctgagaacgtacagcctgcgccatgtgtataaggcgtatcgatcatttcgctttcaaggacttccgctgtttctccgtcatagagaacatcaacggctttctcatgtttgagtttgcctccgcctgtaatgacgacatattgagcgccgagtgcgtgaatttttttcgcggcttcgatcatatcgtcaactgtttttagttcatccatgccgctgagctggctggcttcaaacaagtttggcgtaatgacagtggctagcggagccaattgctcacgcagggcttgggcgtgctccggataaaggacttcattagcacctttgcaaaccataaccgggtcaattaccacattttttaattgtttttctttgatcgtttttgctgcaagctcgataatatcaacggttggcagcattcctgttttcatggcgtccacaccgatgccgtccgtaattgttgcaagctgggcgcggattgtatcagtatcgatcgggaatacctgatggtcccagctgttgtttgggtccatcgcaacgatcaccgttaaggcggtcatcccgtatacgtttttttcttgaaatgtttttaaatcagcttgaatcccagcaccgccgctggaatctgagccggcaatggtgagtgctttgtgcatagacatgtcttgaacctccatcatgttttgtctttcattatagttagattttctctgtatcacaatatagaagatctataggaatcatttgacaatctcaacgggctttcgtaaaatgctacataagaaaactaggtaggggttttgagatgttaaatcgtgagctggttaagggaagcacggttatattggtattgacgcttctgaacgagcggccgatgtacggctatgagcttgtaaaagaaatgggaagccgcagcggaaacgagctgcagatgaaagaagggaccttgtatccttctcttcacaagcttgaacgccaaggatatatttcttcctactgggagaagcaggagaaaggaccggaccgcaaatattaccggattacagacgaaggcaaagaagtgctggcggaacgcacgaaggaatggagcgtattttcagccatgatggaccgaatactgaagtggagcggacaaaatggataaagaaacatatgtatccgaaatcaaaagcgggcttaaagggcttcctgaaggcgaggcaatgatagaagagattgagagccatattgaacatcatctgttttgctcttttcaggaaggaaagagtgaggaggaagctatgcagactttattgcaggcgtttggaacaccaactgacattgtttcttcgtttaagaaaatacagccagtaacgttccgtgcgtttttgatgttccatcttttctgtaacagtgccctattcgctgtcggcattgcgattacaataatgcatgtatggcttgaatcaccgtttgttcaagcagtatggaaaggcatttctgtttctgtttggctgatcttagctgcatatatgatctactgggtgctgattgggtatcaaggcgtgaaggagtttggaaaacgcggagaaaagcttgttctacatacgattctgatctcaatggtgccaaacgtcatttttatgcttgtttttctattcaatgtaattcctgctgcgctgtttcaatccttgttgacaccttggtttgttggaacttgtgctattgcaacgctgttatttccgttatttggccgaatgggctgttatattggcaggcgtcagcttgcctgattttttaggtatatacatagaatttctatgtaaaggatgtgtatgtcgtgaggattagctcttgtttatatggttttgtagctcatggggcagtatttttgtttactggtggctgcatgctcttggctatggcagccagcttgccttttgtttttctgcttgattggctgcctgatgtcgtctttacagcaggtgccattcttacgctgttatgttcatatgcttatgtctggttttgggcggtccgatttgcatataaccagaaaatgcgcctgtttgaggttcaattggggtcctttgtggtgctggccctcatgatatctttgattttattggatggatctagtatgaaagacatcatgatgaattgggacgatacaggctgtgcttttgttccgccggcttttacatttttgtgtctttcttatgcactggtgctgctgccggtctatcaatctaagctgtggcgtcttatccttccgaatggcgtccgcctgaaagatctctttcatgtctttggaaatctgatgctgatcatggtgcttctgatcggagccactttgctgtttctatcattgtagtatgccgtttcagtaggatattcccactgatctcccgtccaatatatgttttaatagtacatgactatgaaaatgagaaggagagcatcatgaagatttctatcgtaattgtgacctataatcggattccggctttgtgtgagcttctggagtcgatttcccgccagaccttgaagccgtatgaaattattattgtgaatgatgccggggaatcggtcgtgccagtcaaagcactgtatccggagctgccgattgctgtcatcaatttagaaaagaactcggggcatgtggctgcgagaaatgccggtgtaaaagaggcgtctggcgattgcattatgctgtgtgatgacgatgatttctttacgccagggcatatcgagaaaatggcaaaggaaatagaaacggcagacttcgttcattctgatgcggaaatagtttcgtttgaagagaaaaacggaacaaggtatccagtgtcacggaaattgtttgcttataccgctgactatgaggatatgagagtgttctctacatacgtgccgtcgggcagcatgtacagacgttttctgcatgatgaaatcgggtatttcgatgctgatgtgcacaattactgggattgggatttttatctgcgcgcagccaaggattaccgggtgaagcgtgtcccttgcgccagtgtgatttatgccttcagtgacgcgggagacaatcagtctgcggaccttggcgccaagcggaagcaatatttggatcgtttaagtgaaaagcacggactcggggagctgccgacgaaaaactttgccgtcctgcttgaagagcctgagatgaagaggcgggaagcaaaaagtgaaatggtttgggatggcgagcctgtctattccagacttcatcgttcgtaagggggcctgaatcttgaaacagcttttacaagacagctggtggaatcagctaaaggaagagtttgagaaaccgtattatcaagagctcagagaaatgctgaagcgggaatacgcggagcaaacgatttatccggacagccgggatattttcaatgcgctgcattatacatcatatgatgatgtcaaggtcgtcattctgggacaagatccgtatcacgggccgggacaggctcaaggtttaagcttctctgtcaagcccggtgtaaagcagccgccttcgttaaaaaatatttttcttgaactgcagcaggacatcgggtgcagcatcccgaatcacgggtcgcttgtcagctgggcaaagcaaggcgttcttttgctgaatactgtgctgacagtaaggcgcggacaggcgaattcccataaggggaaaggctgggagcgactgacagaccggattatcgacgtgctgaatgaaagggagcggccggttatttttattttgtggggacggcatgcccaaatgaaaaaagaacggatcgacacgtccaagcattttatcattgaatcgacgcatcccagcccgttttctgcgagaaacggatttttcgggagcagaccgttttcccgggcgaatgcctatttggagaaaatgggagaggcgccgattgattggtgtattaaggatttgtaaaaagcgcaggtgatctgcgcttttttatttgagtatttttcgaatcattcgcagcccgtttttggaggaaggataacgaaatgcgaagtcgaagcggttcgtttgtttgacgacgctttttttgtgcgtgaatgtgttaaaactgtcaaacccgtgatagctgccgatgccgctttccccgacgccgccgaatggcaaatacggcgtcgcaacatgcattaacgtatcattgacacagcccccgccaaacgacagatttcctaaaacagcgcgctcaatttctttgtttgtggtgaagagatatagggcgagcggcttagggcgcgattggactttttcaatgacttccccgatatcgcggtatgtaaagagcggaagaatcggcccgaaaatctcctcctgcatcactggagagtcatctctcacttgttcgagaatggtcggcgcaattttgtgatgattgggatcagattgtccgcctgtgagtgggatgccgtcattcagaaagctgagcagccgctgatagtgccgttcactgacgattttgccgtactgcggattccgttccggctgagggccgtaaaattctctgatcgcacgcttcatttcttctgtgagcttcgttttgatgtcctcgtggacaaataaataatccggtgcgatgcaggtttgtcccgcatttgtaaatttcccgaagacgatgcgtttggcggcaagctgaatgtcagcatctttatggacgatgcagggacttttgccgccgagctccaaggttacgggaattaattgtttggcggcggcctccatgacgatttttcctacagctacactgcctgtaaagaaaatgtagtcaaagggctgctgtaataatgccgtgctgacgtcgggcccgccttctgccatagcgacataatcggttggaaaaacgctgctgatgagtttggaaagaatagcagaaacagccggcgtatattctgatggcttgagaacgaccgtgttccccgccgcaatggctccaatcaacggagaaagcgccagctgcaagggatagttccaaggcgcaatcaccaaaacggttccatacggctcaggaatgatgatgcttttggagcctagatgagtcagcggcgttttgactcgtttcggcttggaccattttctcagccgtttcatgacaaagctgatttcctccaagacgattccgatttctgttgagtatgcttcttgctcggatttatggagatcctggtagagagcggctatgagatcggcttcatgagttctgacggcttgtttcagcttccgcaaaatgttcagtctcgattcaagcggtctcgtatgtcccgccgcaaaataggctttatgcttgctgatgatagaggggatgctgttcattccgtttctcctttttgtaaggtatggtgatttattatgtgaaaaatctcttctgcttgtcaatcgtgaaaggtttgtcagaaaaaataacaaactcatatctgcgtttacagcaggaatttgataaaatgcaggaagacaacatttatttttttggagggtacttcatgaacattcatatatctgctttgattcaaaagatggaagaagagctaaaaaaagcaaaaacggctgaacgggatgaggagctgaagcgttatgtagcggttgtccgttctctgtgtgatgtcgtgcttgatcagccggagaacgtgagcgcgccccgcatacagccgagcgttacgccaagtcctgccgcgccgccatcgacagaccagctgatgatggaaaaaatgatggggagcgcgggattaaacaaatatcgaaagcaagaaaaagagaagcaggaagaggatggaaacggagagtctttatttgatttttaaagagagaggttgagcttacgtgaaattggttcttggcgcgctgcaatggacagcgtttatcattgctgcggcgattgttgttccggtggcggttgcccagtcgtttcatctggatcactcagattctgcaagattgattcaaagcactttttttgtactgggaattgccgccgtcattcagtgtttgaaaggccacagactgccgattaatgaaagcccagccggcttgtggtggggagtgtatacgatttacgcagggctgacgggaactgtgtttgcgacatatggagacacactgcggggtttgcagggagctcttcttgtaagcgctgtatgtttctttttgttaagtgttttcaaggtcattgacagacttgcaaaattgtttactccggttgtaacgggcgtctatttattgcttcttgtcatgcagctgagtcagcccattataaaaggaattctcggaatcggttatcgacaggacggggtggacggtcttgtatttggcctggcgcttgttgtgatcgctgccgcttttataatgacaaattcgaacatcatgttttttaagcaatattctattttattcgccttgttcggcgggtgggtgctgtttgcggctgccggagcggcaaagccgattgaaatgccggaccggctgtttcagctgccttccctgtttccttttgggacaccgttatttaacagcggcctgatcatcacttctatttttattaccatcttgctgattgtgaatatgctggcgagcatgaaggttgtggacatcgccgtgaaaaaattcagcaaacagcctgatggaaagcatcatgaacgccatgccggttttgccgcttcattcagccatctgcttagcggtttgacgggagctattgcgcctgttccgatttcgggagccgcgggttttattgaaacgaccaaaatgccttctaaaaaaccgtttatgctcggcagtattttggttatcgtgatcagcgtaatcccgttttttatgaatacgtttgcgagcctgccgtcacccgttggatttgcggtgaattttgttgtgttctccgcaatgggcggtctggcctttgccgaatttgattcatatgagaaagaagaatcaaaaagggtgaggtctatcatcggcatctcactgctgacaggggtcggtatcatgtttgttcctgaaactgcgttaaagggattgcatccggtatttatttctctattaagcaacgggctcgtattagggacgcttgctgcaatagctgctgaccagttccagctttggcgcaggagaaaatccgacaatctcgtgtcaacggagaacaaacattgaattttggtgcaggtgcgataagataaatgatatgagtttaacgaaaaggcgggagagatagatgaaagtttttatcatattaggggctattaacgccctgcttgccgtgggactcggagcattcggcgctcacggattagaagggaaaatacctgataaatatcttcaggtttggcacacaggcgtgcagtatcatatgtatcacgcccttgggttattcgttgtcgcgtttctggctgataaattatccggcataggcagtgtcacgacagccggctggctgatgtttgcgggaattgtgctgttttccggaagcttatatattctaagtgtgacgcaaatctccattcttggagcgatcaccccgctcggcggtgtggcgtttattatttcttggattatgatcgttgtcgcagccgtcaaatatctataatcaaaaaagccaatcctcatcatatgagtgattggcttttttcttatcttggcgaataggacgccatggaatatggatacgtataagcaatttcttcatcaaatgtaatgtaatcgaggtagattgtcaggagcaggtagcgtgttcctgatttcgggtcgctgataataatgtgatcccggcctgcagcttcgatgacgccgcgaaaaatcttcgagccccattccttgctgttttcaaatgtcatataaatggtggccgtttttccccgattcaggcgcaaaatattctcgatgtaagattcctcaacaggcagcatgccgggaacgctttggcccggtcctgacggtgtaggccccgatggaatttgaaaaccgccgccctgctgctggcccgggaatccaaatccctgctgtccttgttgtccttgctgtccctgctgcattggcatcattggctgcatccccattggctgcatttgtgagccttggccttgctgcgggtacgggttggcgccaaactgaggctgatacccctgcatattatcaaatgcctgcatttgctgatattgattttttttcggtttcatatcgttcctcctttttatgaaaaccattcaaaacatgttctggatgtataggtgaacgctccgcgatgactcacctccgatggaaaacgatcttagtcgctggtgcgatttttatctctttcaccttatgaggctgatgcttggattatgctgaaaaagaacagcggaccgatcagatttcgctctgggcagccgctgtttttcagagacatacacaaacttttcgcatattggtttgtatccctagcgcaacttgagcataagcaacataagataacgatagtttcaggtgtgaagttccaagaaggaggtgtaggatttgcctaaagtatcagtcattatgacgagctataacaaaagcgattatgtggcaaagtccatttctagcatactctcacaaacgttttcagattttgaattgtttattatggatgacaactccaatgaagagacgctgaatgtaatccgtccttttttgaatgataaccgagtgcgtttttatcaaagcgatgtatctggagtgaaggaaagaacagaaaaaacgagatacgcggcactgatcaatcaggcgattgagatggcggagggtgaatatatcacctatgcgacggatgacaacatctatatgccggaccgcctcctgaaaatggtgcaggagctcgatacccattctgaaaaggctgtgatttactcagcctccaaaacctatcatttaaacgagaatcgcgacattgtaaaagaaactgtcaggcctgccgctcaagtgacatggaacgcaccgtgcgcaattgatcattgctcggtgatgcacaggtattcggtgcttgagaaggtaaaggagaagtttggctcctattgggatgaaagcccggcgttttaccgtattggagatgcccggttcttttggagagtcaatcatttttatccgttttacccactggatgaggagctggacctgaattatattaccgaccaatcgattcactttcagctgtttgaatcagaaaaaaatgaatttgtcaggaaccttcctccgcagcgaaattgccgagagctgcgtgaatcattaaaaaagcttggaatggggtgagagcttgtcggcctatttaagcaattattgggtgctgtaccggaagtacgtggagctttttgacaaacttcgctacaaagggattccgcttgggcttatcagtaatttttatcaatacatcagccctgagctgagggtgatgatggaagaagaaccggaattattcggatcggtggatcagcatatcgatgagggacagattcagccgttttttgaagaaagaatccaaaacatcgttaaaacaaatgacaaacctgttaaagggaaagtcattttgcactttgattacctgcgtttttcaaacgaaaattactttcaatttgatcctgaaaaaacggctgttttggccagatggagtttgccgcattattgtgatctgcctgtaattagcaagcgggagattgcggattcatgccaaaaaggcgattcgaagcagtatctcgaaacagcctgttcgcttctcgccccttatgatgatcacccggcatttggtgatcaagcgtttcgcgaccggcttttcaaagatattcctttatttatagaggccattgatacagttgatgcgctgtttgaacaggaaaagatttcagctgttattgtcggaacggcagaagacatttacagcagggtgctcgctctcatgtgtcaaagaaaaggggccgtcagcatttgtcttcagcatggcgcattgatgggagatgaagccttcattcctgtttttaccagccatcaagctgtttttggtgcgtatgaagcagagtggttcatacgaaaaggctgtaaacccgagcagattctcgtaacgggacatccccgcttcgatcagatttttaacagaacgcctatggatatgtccatattctatcgaaaacttgcttttcagccgactaaaaaaattgtgctcattgccactcagcccttttcagaagacttttattccggtgtgctgcaggggctttctgatcagaagcagctgcaaatcattatcaaaccccacccgtgggaaatcggaaaaaacaagcttgatctgtatcacgaggcggcgaaaaaacataaagcatgcagagtcatcaaaaaggagctggagctttatgatttgctgccgtatgctgatgccgcagtgacgcagacctcgacagtcggtcttgaagccatgctgtttcaaaagcctgtgctgatcggaaaatcgtccggaaatcgctcgtatccgtattatgagtctcttggcgattttatgtttgaccagccggatgaactggcgcacaccttggttgaggttcttcgaagtcccgacgtgcagcaaaaagcagaagaggcgcgcctggcattcatagcggctaattatccggtggcagaatcaacaaatgctttatttgcggaactgaaagccaaaacaggggttgattacaggcgggaagatactgaataaaatgataggagcgcaaagaaatggtgcaaaagagaaatcattttctcccttactcattgccgttaatcggtaaggaagaaattcaggaggttacagaaacgcttgaatcgggatggctctctaaaggcccgaaggttcagcagtttgaaaaagagtttgccgcatttgtcggggcgaagcacgccgtggcggtaaattcatgtaccgcagctttatttttggctttgaaagcaaaagggatcgggcccggggacgaggtcattacctctccgcttacgttcagctcgactgccaatacgattattcatacgggagcgacgcctgtgtttgcggatattgacgaaaacacgctcaatattgacccggtaaagcttgaggcggccgtcacaccgcgaacgaaagcagttgtgcccgtccactttggcgggcagtcctgcgatatggatgcaatattggctattgcccaaaatcatggtttattcgtgctggaggatgcggcacatgcggtatatacgacttataagcaaagaatgatcggttctatcggggatgcaacggcattcagcttttacgccaccaaaaacctcgcgacaggggaaggcggcatgctgacgactgatgatgaggagcttgccgataagatccgggtgctaagccttcacggcatgagtaaagccgcatggaaccgttattcttcaaatggcagctggtactatgaagtcgaatcgcccggctataagatgaatatgtttgatttgcaggcggccctcggacttcatcagctgaaacggctggatgatatgcagaaacggagagaagagattgccggccgctatcaaaccgcttttcagcagattcctgggctgatcacgccgtttgtccatgatgacggcaggcacgcctggcatctatatgttctgcaagttgatgaaaaaaaggccggagttacgcgcagcgaaatgattacggctttaaaggatgaatacaatatcggcactagcgttcattttattccagtacacattcatccgtattatcaaaagcaatttggatataaggaagcggactttccgaatgccatgaattactataaacgaaccctttctctcccgctctatccatcaatgtctgacgacgatgtagatgatgtcattgaagctgtgcgggatatcgtaaaaggggctgattaagtgtatacggtaaaagaaaatgtctccaaagaggcgattgaggaatttctccaaagcagaaagcttacactggatgttccgtatcaattttccctcggcctttttgaaaacagcaggctccaaggcgtattgctttacgaagattctttgtgggaaagcaaggtgcttcagaagaaagtcatgaacgtcaaacttcttgcggcaaatagtaccgggcagctaaagaggctgtttgaagctttttatactgtacgccaaatggatgaaacggattttatctttgtccgtgttccggctgaagatatcggagccgcgcatgtgatacaacagcagccatcctcttactttgtcgggagtttgctgaagctggcgatgcctccgtctttttatgacaaaacaccgccattttttgaactgggcccgcctgagcccggagacacagaagcgatatgtgagctggcccgagactcgtttacaaaaagcagatattttcaggatcctcatctcagccgcgatgcagcaaacaaaatatttcaggagtggacacgaaacaatctgaatggaagggcggcggtcaatattgtcgctaaatacgatggcgaggtcatcggctatcttcagggcttatcaagagatgatgaatgcattctcgatttgatggctgtaaagccgggatttgaaggaaaacgtattgcatttcatttattggcgaatctcatagaacaaccggagacccagaagcatagaacggtaacagcggggacgcagcttcacaatgtaagggcgatccgcctttatgaacgaatgggcttcaccgctgaacaatcgtattactattatcatatttggccgggcaaggaggcgaaataatggcagcgtttcagatcgcgaataaaactgtaggcaaagacgctcctgtttttattattgctgaggcggggattaatcatgacgggaagcttgatcaggcttttgcgctgatagacgccgcggcggaagcgggagcggatgccgtgaaatttcaaatgttccaagctgataggatgtaccagaaagatcctggtttgtacaagacggcagcgggcaaggacgtctctattttttctttggttcaatctatggaaatgcctgctgagtggattttaccgctattggattactgccgcgaaaagcaggtgatctttttaagtacggtatgtgacgaggggtcagctgatctgcttcagtctacctcgccgagcgcttttaaaatcgcatcctatgaaattaaccatctcccgctgctcaaatatgtcgcccggctgaacaggccgatgattttctcgacagccggagctgaaatctctgatgttcacgaagcttggcgcaccatcagggcagagggaaacaatcaaattgccataatgcattgtgtggcgaaatacccagcaccgccggagtacagcaacctcagcgtcattccgatgcttgccgccgcttttcctgaggcagtaatcggcttctccgatcatagcgagcatccgacagaagcgccatgtgccgcggttcggctcggagcaaaactgatagaaaagcattttacgatcgataaagatctgccgggtgccgaccactcgtttgcattaaatccggatgaattgaaagaaatggtcgatggcatcaggaaaacggaagctgagctgaaacaggggatcacaaagccggtctctgaaaaactgcttggcagttcatacaaaacaacaacctccatcgaaggagaaatcagaaattttgcatacagaggcatttttacaacagctccgattcaaaaaggtgaagcctttagtgaagacaatatcgcagtgcttcggcccggacaaaagccgcaggggctgcacccgagattttttgaactgctgaccagcggtgttcgggctgtaagagacattccagccgacacaggcattgtctgggatgacattttactgaaggacagcccgtttcatgaatgatattctctttatcattcaagcaagaatgggttcaacaaggcttccgggaaaagtgcttcggccgctcggatcgaatcgtttacttgatattctcgttcaccgtgtccggcaaagcgcgttttaccaaaaggatcgggataatcttgtcatcgccacgtctgacaaagaaactgacgacatattagaggcgcactgtatcaaacaaggctttcgtgttttccgcgggagcgaagaacgtgtcctcgataggtttgtgaaggtcatagaagctgttaaaccgtcagtcatcatccggttaacgggtgataatccgtttgtcgatccggagctgctcgatgtaatgattaaggcgcattttgatcaaggatcggattatacgtatatcctgaatgccccattagggatttgcggcgaagtggtcaacgccaacctgttaattgacatcagccgtattcagaatatggaggatcaatatcaggagcatgtcacgttatatataaggaatcatccagctctttatcgtgttcagtttttagaggcgccggaacgatttcgcgcccctcaatatcggctgaccattgatacaaaggaagactatgaatcgataaaggccctctatcaaaaagcaggcgagcgccccgatgtatccgcctcagagcttatcacccttctgaaccggaaccccgatgcggcaaccgaacgagaggctgactagccatgcgtgttgggatcttcgcagacggcggctatgaaaagggaatgggccatgttgtccggatgaagagacttgcggaggggctcaaacagcgatgcttgattacgttttatacgaatcaggagtctgaagcgtttcttcatgaagagcattggcgtgtcatcgtaaagccggagctgcagcagcacgaatttattctccgggaaataaaaagcaagaagcttgatttgcttttgtttgatattctaggcgcgcctgcagagctgttaaagaaaataaagacggagacagatgcgaaaattgttctttttgaagagaaaaacggtaaatcaattcaatatagtgacgcagtcattaacggaatttacggtgacatcagaagcagggtgtacgttcagggaaacacacgcatttatgaaggtccggactatcttattcttcaccccgcctttcaggccgcaagagaggattacacacttaagaaagactgccgcaatatccttgttgcattaggaggaagtgatccgaagcagcttatttttaaagtgctggctgccgctgatcaagtccccgacataaaagacaaaaacatgatgtttgtaatggggagcgcttcaccgcatcaagaggcagtccgaaggcggatcgaaaagaagccgcagtacaagatgatcgaacagacaaatgatatggcaggtttgatgaaacaagcggacgcagccattgtcgccggcggcatctctctatatgaagccatttgcatcggcgtgccgtgccttgttctttctcaggttgagcatcaaacggcaacagcaaaaacatttgctggccaaggcgccgctcttgatcttggtttgggtgagcttgtaccggatgaaacactcatctatcagatgtcacgcattatgagcagctatcctcttcgcctttctttgcacaagggaggaaggccgctcgtggatggcaaaggcattatacgggtaacagctattcttcaagatttatatgaacaagagatataaaaatgcatgtaaggaagtgttaatgtgaaaggtgttattttagccggaggaaacggctcacgccttatgcccttaacgaaagccgtcaacaagcatttgcttcctgtaggtccgtatccgatgatatactggtcgattatgaagctggaggaagccggaataaaagacattttactcatcagccaaaaggagcatatgccgcaattttacaaactgcttgggaacggggaagagcttggcgttactatcacttatcaagtacagccggcagcaacgggcatttcggatgggctgtcttatgcaaagcgctttacgaaaaaagagtctttcattttattattaggtgataatatatttgaagattcattaaagccttatacagaacgctttgaacagcaggggaaaggagcaaaagtgcttctgaaagaagttgatgacccggaacgtttcgggattgctgagattgatgagaaaaacaagcggattcgttccatcatcgaaaagcccgaacagccaccgaccaacctttgtgttaccggcatttatatgtatgatgcagaggtgttttcatatattgaacaaatatcaccatcaaagcgcggcgagctggaaatcaccgatgtgaataatctatacatcgaaaacagccagcttacgtatgatgtgttatcaggctggtgggtagatgccggaactcacgaatcgctttatctcgcttcccagcttgtacaccaggctctacggaaaggacaggacgaaaagtgatggcaaaatcatatttaattacaggcggggccggcttcatcgggctcacgtttacaaagctcatgctgagggaaacggatgcgcgcattaccgttttagataaactgacgtacgccagccacccggaggaaatggaaacattacagcaaaacagccgttttcgctttgtaaaaggggacatcagcgttcaggaggatatcgaccgggcgtttgacgagacctacgacggcgtcattcacttcgcagcagaatcgcatgtggacagaagcatttcccaagcggagccgtttatcaccacaaatgtcatggggacataccgattggcggaagcggtcttgaaaggaaaagccaagaagctgattcatatttcaacagatgaggtgtacggggatttaaaagcggatgatcccgcgtttacagaaacgacgccgctttctcctaataacccatactcagccagcaaagcaagctcagatttgctcgtgttgtcttatgtgaaaacccacaagcttccggccatcattacacgatgcagcaacaattacggaccttatcagcacagcgaaaaaatgattccgacgattatccgtcatgcgaagcagggcctgcctgttccgctctatggcgatggactccagatccgagactggctgtttgcggaggatcattgccgcgcaattaaactgattttagaaaaaggaaacgacggcgaggtgtataacatcggcggcggaaatgaacgcacgaataaagagctggcgagtgtcattttgaaacatctgggctgtgaggaattgttcgcccacgtggaagaccgaaaagggcatgaccggcgctatgcgatcaatgcatcaaagctgaaaaatgaactgggctggcggcaggaagtgacgtttgaagaaggcattgcgcgtacgattcagtggtatacagacaatgaccgatgagaaggtgatctgattgacaaaggtattggtaactggggcgggaggacagcttggcttggaactatgccgccagctgaagcaagccggatatgaggtcattgcgttaacaaagaagatgatgaacattgctgaccagcgctcagtacggcattcgtttggccattatcagccggatatcgtggtcaatagcgccgcgtttacgtcggttgatcaatgcgagaaagagcttgataaagcgtacttgattaacggaatcggcgcttattatacagcgcttgagtcaacccgcatcggagctcaatatgttcatatcagcacggactatgtattcaatgggaaaggaacccagccatatagggaagacgatcccctcgatccgaaaaccatttatggcaaaagcaaaaggctcggagaagaactgatacgattaacgacaaaagacagcacgatcatcagaacatcgtgggtgtacggacatggcggcagtaatttcgttgaaaccatgctgaagcttgctgaaacgaaacaagaacttcgggttgtcagcgatcaaattggttcgccgacttatacgaaggatttagcagaagcggtcatcaagctgttcagccatccgccgggcatctatcatgtcagcaattcaggcatatgcagctggtatgagtttgcgacggcaattatggaagaaagcgggctggaaacagccattttgcctgtaacgacagaggaatacgggaacaaaacgccccgcccggcatactctgtgctgagccatcgggccattgaagaagccggcatccgcccccgccactggcgggaagcgttacgagagtatttgcaggaaaggagcagtgcgtgtgattgatggagtcaaggtgaaaaaattgatgaagcatagcgatgacagaggcttttttgctgagctggtccgggacgatgagaatctccttgagcattttgggcaggcctcttggtcgaaaagttatccgggtgtgattaaggcatttcattatcatgagaagcaggatgatctctggttcttcccaaccggccacgctcaggttgtcctatacgatcttcgagaggattcaaagacaaaaggagaaacggacgtctattatatgggcgaagacaatccgatgctgttattaatcccaaaaggggtggctcacggatatagagtgctgggagagacgccgctgacaattatctattttaccaccatgtcgtataacccggatcagcctgatgaaaaaagaattccgtgggatgatgagacgatcggttttaactggaacactgaattcagataaaaataggaacgtgatcaatcgaagagcagaggcatcttcgactttttttgcccttttttaaaataggataaaagataggaaatgtcaggtagatgttactagaaaaagagagagaaatcgtccatttgaaccttgtataaacaggaaggaattctcattgaattccaagtgttaatattccttaaaaaacatttacttccatggaaaatgatgatagattaatttttaagaaaaagaactggtaattcgcgaattatgaaaaagtgctttttctgcagaggacgctctggccaaatttcaacaatcatttagggggaaatgtcatgctaaaaagaacttcattcgtatcttcattattcatcagttcagctgttttactatcaatcttacttccttcgggccaagctcatgcacagtctgcattaatcgaggcaaaaacaattaacagcacgaaagagtggaccacttctgatattgaagtgacatataaaccaaatgcggtgctttctcttggagcggtagaatttcaatttcctgacgggtttcatgctacgacaagagattcagtgaatggaagaacactgaaagaaacacagattttaaacgatggaaaaacagtcagactcccgcttacgcttgatttgttaggcgcatccgaatttgacctcgtcatggtgcgcaaaactcttcctcgcgcaggcacttacacgattaaaggcgatgtagtaaacggtttgggaatcggcagtttttatgctgaaacgcagctggtgattgatccccgttaatcgatagatttgtagtcagagactgagatgttttcagtctctttttttgtggattcaaaagctggtacggatcttgcatgatgataagggtgaatccaatgcagaaaggaattggcgggctgattttttaaagcgcttacattacagccggccaaaaaaacaatgaggtgaaaaagatgtcagcaaagcaagtctcgaaagatgaagaaaaagaagctcttaacttatttctgtctacccaaacaatcattaaggaagcccttcggaagctgggttatccgggagatatgtatgaactcatgaaagagccgcagagaatgctcactgtccgcattccggtcaaaatggacaatgggagcgtcaaagtgttcacaggctaccggtcacagcacaatgatgctgtcggtccgacaaaggggggcgttcgcttccatccagaagttaatgaagaggaagtaaaggcattatccatttggatgacgctcaaatgcgggattgccaatcttccttacggcggcgggaagggcggtattatttgtgatccgcggacaatgtcatttggagaactggaaaggctgagcaggggatatgtccgtgccatcagccagatcgtcggtccgacaaaggatattccagctccagatgtatacacaaattcgcagattatggcgtggatgatggatgagtacagccggctgcgggaattcgattctccgggctttattacaggtaaaccgcttgttttgggaggatcgcaaggacgggaaacggcgactgcacagggcgtcacgatttgtattgaagaggcggtgaagaaaaaagggatcaagctgcaaaacgcgcgcatcatcatacagggctttggaaacgcgggtagcttcctggccaaattcatgcacgatgcgggcgcgaaggtgatcgggatttctgatgccaatggcgggctctacaacccggacggccttgatattccttatttgctcgataaacgggacagcttcggtatggtcaccaacttatttactgacgtcatcacaaatgaggagctgcttgaaagggattgcgatattttagtgcctgccgcgatctccaatcaaatcacagccaaaaacgcacataacattcaggcgtcaattgttgtcgaagcagcgaacggcccgacaaccattgatgccactaagatcctgaatgaaagaggcgtgctgcttgtgccggatatcctggcgagtgccggcggcgtcacggtttcttattttgaatgggtgcaaaacaaccaaggatattattggtcagaagaagaggttgcagaaaaactgagaaacgtcatggtcagctcgttcgaaacaatttatcagacagcggcaacacataaagtggatatgcgtttggcggcttacatgacgggcatcagaaaatcggcagaagcatcgcgattccgcggatgggtataatttgagaagcctccgcaaaataattttgcatttgttttttgcgtaaagagcaaaaatcgcaaaataaatttgcgttcaagatcggaaaaagagaaaggtgatcacctgttagacaaatttctgttcgcttcaacaagttttttcagcaaaagacaagaaaatggcatgattcttgcatttttattcatatgcgaagatatatttcataacacgagagggactacatatgacagtcacatacgcgcacgaaccatttaccgattttacggaagcaaagaataaaactgcatttggggagtcattggcctttgtaaacactcagctcggcaagcattatccgcttgtcataaatggagaaaaaattgaaacggaccgcaaaatcatttctattaacccggcaaataaagaagagatcattgggtacgcgtctacagcggatcaagagcttgctgaaaaagcaatgcaagccgcattgcaggcatttgattcctggaaaaaacaaagaccggagcaccgcgcgaatattctctttaaggcagcggctattttgcgcagaagaaagcatgaattttcaagctatcttgtgaaggaagcgggaaaaccgtggaaggaagcagatgcggacacggctgaagcgatagactttttagagttctacgcgcgccaaatgttaaagctcaaggaaggggctccggtgaagagccgtgctggcgagttcaatcaatatcattacgaagcgcttggcgtgggcatcgtcatttctccatttaatttcccgcttgcgattatggcgggaacagcggcggcagcgattgtgacaggaaatacgattctcttaaaaccggctgacgcagccccggtagtggcagcaaaatttgtcgaggtcatggaggaagcgggtctgccaaacggcgttctgaattacattccgggagatggagcggagatcggtgatttcttagttgagcatccgaagacacggtttgtctcatttacaggttcccgtgcagtcggctgccggatttatgagcgagccgccaaagtgcagccgggccaaaaatggctcaaacgggtaattgcagaaatgggcggaaaagacacagtgcttgtcgacaaggacgctgatcttgaccttgctgcatcctctatcgtgtattcagcatttggatattcaggacagaagtgttctgcgggctcccgcgcggtcattcatcaggatgtgtatgatgaagtggtggaaaaagctgtggcgctgaccaaaacgctgactgtcggcaatccagaagatcctgatacgtatatgggtcccgtgattcatgaagcatcctacaacaaagtgatgaaatacattgaaatcggcaaatctgaaggcaagctattggccggcggagaaggcgatgattcaaaaggctactttattcagccgacgatctttgcagatgttgatgaaaacgcccgcttgatgcaggaagaaattttcggcccggttgttgcgatttgcaaagcgcgtgatttcgatcatatgctggagattgccaataacacggaatacggattaacaggtgcgcttctgacgaaaaaccgtgcgcacattgaacgggcgcgcgaggatttccatgtcggaaacctatattttaacagaggatgtaccggagcaattgtcggctatcagccgttcggcggttttaatatgtcaggaacagactcaaaagcaggcggtcccgattacttaattcttcatatgcaagccaaaacaacgtccgaagctttttgatttgagagaaataaaatcgtgcgattctttagcggatcgcacgatttcaactttttgatcaggaggacaatttatgcagtatacaaaaatcagtcacatgaatccggctgaaagagtggaggcgctgacagcatctctggtcagcctcagcagcgtgaacggcaccgttggagaagggacaaaagcagatttcatcaaagaagtgatcacgagctatccttattttcaggaaaaccccagtcatgtgtgggaacaggccattcccaatgacccatacaatcgcaaaaatatttttgcgtttattaaaggacatggagaaagccgtaatacagtcatttaccatgcccatctggatacagttggaatcgaagatttcggccctttaaaggatatcgcttttgattgtgagaaattggccgagtatttcagccgctatgagttcgatcaggatgttcagcgggatgccaaatcaggcgagtggatgttcggaagaggatctgtcgatatgcaaagcggcatcgccgtgcatttagccaatctcctgcatttttcggagaaccttgagacgttgccgggaaatgtattgtttatggccaatcccgatgaggagagccagcattcgggcattctcgccagcatttcagagctgaaccggctaaaaaaagaaaaacagcttcactatttggctgctattaatacggattttattaccccgctttacgatggtgatcagacaagatatatctataccggagccgcgggaaaactgttgccttgcttttacatttacgggcgtgaagtccatgttggcgatacactggcagggattgacccaaatttcatttcatctgaaatcacaagccgtctccacaataacatccatctggcagaaaaggttgaaggggagttggttctgcccccatcctgtttgtatcagcgtgataacaaggaatcctataatgtgcaaacggctgtcagcaccagcttgtatttcaattgttttatttatgaaagaacagcaaaagaaatgatggatttgcttattgaagtcactgaggaagcatgccgggagacagaacaaaaattatcagattattatgaagaatatgtaaaaagagccaacctgccaaagaaacatttatcatggggcattcaagtgtatagcctggagcaatacttagaaaagctgagaaaccggggaatagatcccgagcagtgtatcgagcagacattcaaagccaacgagcaccttgaacttcgcatgagatgctttcaggcaatcgaagagcttcaaaagcttgaccccgatcaaggcgcaaaagtcattctattttacgcacctccttacctgccgcataactatttgaaagaagatagcgcaagagatcagcttttgcagcatgtgattaaagaagcggctgacaaaaccgctgaatcgacaggcgaaacatttgtcttcaaaaagtttttcccctacttggcagacggcagttttttatcactgcacgaaaccgatggcgaaattgattcttttatcaggaacttctgggtggaatatgattgggaccattccgttcaaagacatacgcaagctgaatattccatccattaatatgggcgtgtacggaaaagacggccataaatggacagaacgagtctataaaccgtacacatttcatgtattgcctctcctcatacagcaaaccaccgttcaccttttgcaaagctaccggatgaccatcacggcaaaagaaccaaagggggaaggatgatgcagaatcataaaaatgaattgcagcgcagcatgaaaagcaggcatttgtttatgattgctttgggaggggtgattggcactgggctgtttctaggctctggctttaccattagccaggcgggaccgctcggcgccattgccgcgtatatcatcggcggatttttaatgtatctcgtcatgctttgtttaggagaattggctgttgccatgccggtggccggatcgtttcaggcctacgccactaaatttctgggaccgtcgacaggctttatgattggctggctgtattggttcagctgggcgaatacagtggggttagagctgacgtcagcaggcattttgatgcaaaggtggctgccctccgttccgatctggatatggtgcctcgtgttcggcatcgtcatctttttgattaatgcgctctctgtcagaagctttgcagaaatggaattttggttttcaagcatcaaagtggcggcgatcatattatttattgtgattggcggatccgctgtgtttggcttgattgactttaaaggcggacaggagacaccctttttgtctaactttatgactgataggggacttttccctaatggggtgctggccgttatgtttacgctggtcatggtgaacttctcctttcagggaacggagcttgtcggcattgccgcaggggaaagtgaaagcccggaaaaaacactgccaaagtccattcgaaatgtcatttggcgcacgctgtttttctttgtgctcgctatgttcgtcttggttgccatccttccgtacaaaacggcgggggtgattgaaagcccatttgtagcggtactcgatcaaatcggcatcccattttcggcagatatcatgaactttgtcatcttaacggccattttatctgttgctaattcgggattgtatgcggcgtcgcgtatgatgtggtcactttcatcaaatcaaatgggtccatcctttctcaccagactgacaaaaaaaggcgtgccgatgaatgccctgctgattacgctaggcatttcaggctgttcgctgctgacgagtgtcatggccgcagaaacagtgtatttatggtgtatctcaatctcgggcatggtgacagttgtcgcgtggatgtccatttgtgcgtcgcaatttttctttcgcagacgtttccttgctgaaggcggaaatgtgaatgatctagagttcagaacgccgttttatccgctagtcccgattctcggattttgtttatatggctgcgtgttgatcagccttattttcattccggatcaaagaatcggcttgtactgcggtgtgccgatcattattttctgctatgcatactatcatctgagcatcaaaaagcgtataaatcatgaaccgattgaaaaaaagcagacagaggcgcaatagaaaaagctctccgggaggccggagagctttttttacgcattacatcctcatgtgtttttagaatgaaatatagaaatatataatgggatttaaatgaaaataataaaacttataaatatttcgttcgaattgtaaatagtgaaaaaacaatgctaaactataatacaactttatgataagaagattatggaagaggtgtttgagaaagaatgaacagcaatcaaaacaatgacatcaaaacaaaacatcattttccgttattgttggcactggctttaacgatgggggtatttgcagccggatctgaagagcttgtgatctcaccgctgctgccggatttagcaaaagccttcaactcagatgtcagcgtccttgcgttatctatcagtatttacggcgttatgatttttatcggtgcgccgcttttggttccattaggcgataaatactccagagaactgagcttattggccgggcttatgatttttatcataggaacggtgatatgcgctttagctcaaaatatttttttcttctttttaggccgggcgctttcgggattggctgcgggagcgtttgttccgaccgcttacgcagttgtcggtgatcgtgtcccttatacataccggggcaaggtgatgggactgatcgtttcaagctggtcgctggcgctgattttcggagtgccgctcggatcatttatcggcggcgtcctgcattggagatggacgttttggattttcgccttgatgggcgttttagttgtcctgctgattctccttgaaatgcgccgccatgcccaacataaaaacagcggcaaggaagaaatagaagagccggcaggaacattccgggatgcgctgaaagtccctcgtgtacctgtttatatcacgataaccttttgtaatatgattggtttttacggtatgtattcctttctaggcacctatcttcaggacgtttttaccggaggaaacacggctgcgggcttatttatcatgatttacggaatcgggttttccatgagtgtgattacaggaaagatagccgaccgcatcggaaaaatgcgctcccttttgattgcgctgggggtcatcagtgttctgctggcgtgtttaccatatgcgccggcgtctatgtttctgttaatcgccagcctatttatttggggattaatgcaaagtttgacggtgacgctgctcagcaccattttgagtgactgctcagagcgtcatcgcggaaaagtcatggtgttttacagcctcgcctcgaatctggccgtgacattaggttctgctttaatgggacccgtctatgtggcatacggctatgcagctgtcggattgatttgcgcagccatcacagtcctcggatttgtgctcagtatattcgcatataaaaagtacggcaaacttgagcagaaggccgatcaatccttatctcaataaacaaagtttctaaattcctataattaaaaaccctttttaaagggtttttttgtttgtatgggaataattatcaatattttcaaaaaacattgacagttcaatttccgctggataaaatttacttaaaattttaaaagattggttggtgctcatgattatattggataatagcattcagacaaaaaaaagaactgattcactatccaaactcattacagtcaacacgctcggccctgaggggacaagcagtgagtacgcagcaaagcatttcatttccaattttactcttctacaagggctgaacagtaaattgtccttgcatgatacttttgaatcatgcatcgaaaggacgctccaaagcccgctggaatataccatcgtcccacatgcttacgatggcattaagcatttctacatgaggccggatttgcagctattgcagatcttcaggtgcgatacaccgatgtacggcctggctgttcgtcctgattttgaattcagggacgatatgcttgatacatctgttattgtttcacatccttcacctattaatttaataaaatattttacccgcaaagatgttcgtttcaaactagtcaattcaaccagtcaagccgcaagaaaagtaaaagaaggtttgtatgacattgccttaaccaatgagcttgcacggcaaaagtacgggctaacctttgtaaaaacattcaaaagcattccaatgagctggtcattatttggaaaaggagacgttgatgatgaaaactaaagaagatatgcaggagctttatttcccgacaccgaaattaattgaatgggaaaacggagtgaggcagtattcaaccgtacgaggggatactgaagtattaatgtcttacgtcccgccgcataccaatgttgaaccccatcagcataaggaggtccaaatcggcatggtcgtttctggcgagctgatgatgactgtcggagatgtgacaagaaaaatgacagccttggaatctgcctatatcgcgccgccgcatgtgcctcacggggcaagaaacgacacagaccaagaagtgattgctattgatatcaagcggctgaaagctgatgaaacatatacaagtcctgaggactactttttggatattttcaaaacaagagacctgttgccgggcatggaagtcacgttctttgttgaggattgggtagaaattatgcttgccaaaatccctggaaatggcggagaaatgcctttccataaacatcggaatgaacaaatcggcatctgcatcggcggcggctatgacatgacggtcgaaggctgcacagtcgagatgaaattcggcacagcctatttctgtgagcctcgtgaagatcacggtgccatcaaccgttcggaaaaagaatcaaaatcgattaatatcttcttcccgccgcgctacaacagagcaaaagcaaaaaaaatgaaggcggatgaatgatcatgaacctcaccgataaaaccgtcctcataacaggaggcgcatcaggcattggttatgctgcggttcaggcttttttgggccagcaggccaatgtggttgtggcggatattgacgaagcgcagggagaagcaatggtacgaaaagaaaataatgacaggctgcactttgtgcaaacggacatcacagacgaagatgcctgccagcacgcagttgaatcggcggttcatacatttggcgggctcgatgtcttgattaataatgcaggcatcgaaatcgtggcgcctattcacgagatggagctcagcgattggaacaaggtgctgcaagtcaatttgaccggcacgtttttaatgagcaaacatgcactcaagcatatgctggccgccggcaagggcaacatcattaatacgtgctctgtcggcggactcgtggcatggcctgatattcctgcctataacgccagcaaaggcggggttttgcagctgactaaatcaatggctgttgattatgcgaagcatcaaattcgcgtgaactgcgtatgcccagggatcatcgacacaccgctgaatgaaaaatcattccttgaaaataatgaaggcacacttgaagagatcaaaaaagaaaaggcgaaggtaaatccgctgctgaggcttgggaaacctgaagaaatcgcaaacgtgatgctgtttttagcctcggatttatcaagctatatgaccggaagcgccatcaccgcagacggaggatacaccgcacaatagagaaggagtgttttacatatggagagaaaaacagtattggtcatcgctgatcttggaggctgcccgccgcacatgttttataaaagcgctgctgaaaaatataacctggtcagctttattccaagaccttttgcaattacagcctcccatgcagcattgattgaaaaatactcggtcgcggtcataaaagataaagactattttaagagtttagctgattttgagcatcctgattccatttattgggcgcatgaggatcataacaagcctgaggaagaggtcgtcgagcaaatcgtcaaggttgccgaaatgtttggggcggatgccatcacaacaaacaatgaattattcattgctccgatggcgaaagcctgtgaacgtctgggcctgagaggtgccggcgtgcaggcagccgaaaatgccagagataaaaataaaatgagggacgcttttaataaggccggagtcaaatcgatcaaaaacaaacgagtcacaactcttgaagatttccgtgctgctcttgaagagatcggcacaccgcttatcttaaagcctacatacttagcgagttcaatcggtgtaacgctgattacggacactgagacggcagaagatgaatttaacagagtcaatgactatctgaaatcaattaacgtgccaaaggcggttacgtttgaagcgccgtttatcgctgaagaatttttacagggtgagtacggagactggtatcaaacagaagggtactccgactatatcagtatagaaggcatcatggctgacggtgagtatttcccgatcgccattcatgataaaacgccgcaaatcgggtttacagagacatcccacattacgccgtccattctggatgaagaggcaaaaaagaaaattgtcgaagctgccaaaaaggcaaatgaagggcttggcctgcaaaattgcgcaacacatacagagatcaagctaatgaaaaacagagaaccgggtttaatagaatcagcggccagatttgccggctggaatatgattcctaacattaaaaaggttttcggccttgatatggcgcaattattattagatgtcctttgtttcggaaaagacgccgatctgccggacggattattggatcaagagccttattatgttgccgactgccatttgtacccacagcatttcaaacaaaatggccagattccagaaactgctgaggatttggtcattgaagcgatcgatattccggacgggcttttaaaaggggatactgaaatcgtttctttttcggccgcagcaccaggcacttcagttgatttgacattgtttgaagctttcaattccattgctgcatttgaactgaaaggcagtaattcacaggatgtggctgaatcaatcagacaaattcagcagcatgcgaagctgacggcaaagtatgtgctgccagtatgaaacagctgaaacccaactctaaatacttgctttacgggcaggcgctatcgttcatgggagactattgtgttctccctgccctgctcattttgtctacatattatcacgattattgggtgacgtccggggtcatcgtggtcagaagcattccgatggtgtttcagccgtttttgggggttctggtcgaccggttagacagaattaagatcatgctgtggacggatatcatcagaggcatcatctttttggggctcacatttcttccaaaaggcgagtatccgctgatttttctggccctgctgtttatttcttatggaagcggcgtgttttttaatcccgcccgtctcgctgtcatgtcgtccttggaatcagatattaaaagcatcaacacgttatttgcaaaagcgacaaccatttccattatcgtcggggcggctgccggagggctctttctgttaggcggatctgtagagctggctgttgcctttaacggtgtgacatacctggtttcggcattttttatcagccgtatcaagctgcaatttgtgccgattcaatctgaaaacataaaagaggcctttcagtcttttaaggaagggctcaaggaaatcaaaaccaatgcattcgtattaaacgccatgtttacgatgattacgatggctttgctgtggggagttgtgtacagctattttccgattgtcagccgctttctgggtgacggggaaatcggcaactttattctcacgttctgcatcggcttcggcggctttatcggagcggcgcttgtcagcaaatggggctttaacaacaatagaggcctgacgtactttaccgttttatccattgtctcgctggcgctgtttttattcacaccgatattcgctgtttctgtcatcgcggcgatcctctttttcatcgcgatggaatacggggaagtgcttgcaaaagtgaaggttcaggaaaatgcggcaaaccagattcaagggcgcattttttcagtggccgaagcgtctatcggattatgcatttctattggttcaatgttcattaacatcctaagcgctccggtcattatggggctgattgtcgtgatcgtatgcggtttgtttttgcatacgaagctcgtcaacaaatcgtttttggaacgggataacaaaacggagcaaaaaggagtcttttagatggaaataacaccgtccgatgtcatcaagacacttccaaggcaggagttttctctcgtttttcaaaaggtaaaggaaatggaaaaaacgggagcccatatcattaatctcggacaggggaaccctgaccttcccactccgccgcatattgtcgaggctttgcgggaggcgtctctgaatccttcgtttcatggatacggcccattcagaggttatccttttttgaaggaagcaatcgctgctttctataaaagagaatacggcgtgacaatcaatcctgaaacggaggtcgcgcttttcggaggcgggaaagccggtttgtatgtgctgacacaatgcctgctcaatccgggagacatcgctttagtcccgaatccgggctaccctgaatatttatcagggattacgatggcgcgagctgagctttacgaaatgccgctgtatgaagaaaatggctatctgccggattttgaaaagattgatccagccgtgctggaaaaagcgaagcttatgtttttaaactacccgaacaaccccactggagctgtggctgatgcggctttttatgcaagagctgctgcttttgcgaaagagcataacatccatttgattcatgattttgcatacggagcgtttgaattcgatcaaaaaccggccagttttcttgaggcagaggatgccaaaattgtcggagcagagctttattcattttcaaaaacatttaacatggccggctggagaatggcgtttgcggttgggaacgaaaggatcattcaggccgtcaatgaatttcaggatcatgtatttgtcggcatgttcggcgggctgcagcaggcagcgagtgcggcgctttctggagatccggagcatacggaatcgttgaaacgaatttataaggaacgaattgacttttttacggcgctttgtgaaaaggaactgggctggaagatggaaaagccaaaaggaaccttttacgtatgggctgaaattccgaatacgtttgagacatctcaccaattttccgattacttgctggagcatgcccatgtcgtagtcacaccgggcgaaatttttggaagcaacggaaaaaggcatgtcagaatctcaatggtgtcgaagcaggaggatctgcgggaatttgtcacgcggattcaaaagctgaacctgccgttcgggtcattacaagaaacatcccgctaaaaagcgggatgtttttatatgcttttcatgctgccgccatcagcggaaatttgctgtcccgtgatgtaggaggcttcctcagaggcaagaaacgcggcgagcgctgcggtttcttcggctgatccgacccgtttcatcggaatcccggaagcaatctgttcctctgctttctgtttggatatgctgttctttttcatcacattttccacaaattgatgataacggtctgtagcgataaaaccaggattcagacagttgacagtaatgttgtgaggagcaagctggatggaaatatttttactggcgtttattaaagcggcattcatcatactgtttgtgaacatgttggcgccgggttctttccacagatttccgacaatgttgatgattctgccaaactcgttttgtttcatcagtgaggaagcacgcttgatagcgtcaatataggcaacggtcttttgagtgaacgtggccgtcatatcgtctatattgcagttatcaaatgtatcaggcgcgccgcccgggatattattaatcagaacatcaagccgtccgcattgagattcgatttcctgaaaaatggccgctctcgtatgctggtcagacatatcgcccgcaaggacaatgacgctcgcctcaggatgcttggccaaaatgtcttctttgacagattcaatattatccaaacttcgcgaattaatgacgagggaaaagtgctggtctgctaatttcagagcgattgctttcccaatcccttgactggctcccataacaaatgcggttcgttttgacaaataactgcacccctttgaaaaaattggattattatctacatcgtaagaaaaaacgaagaaaatagcaaattttatttaaattctgataaaggaggattgaaaaactcccgccggatagggcgggaggggatattatacatataggaattgaggaagtgtatcaagcgaaaggtgattgccgacaaagaatgaaccaaattcgccatagcgagcgctgacttcgtcaaaacgcatttcgtacactagcttcttgaattgaaggacatcatcgctgaataatgtaacgccccactcgtaatcgtcaaagccgacagagccggtgatgatctgtttgactttgcccgcatagctgcggccgattaaaccgtggcttctcatcaagtttctgcgttcctccattgaaagcatataccagttgtcgttgccggatcttcttttatccattggatagaagcatacatattttgattccggcagttcagggtaaaggcgcgcacgcacatggggattttcataaggatcgccatcaccgcttgccaagtagttgctcagctctaccactgatacgtaggagtatgccggaatggtgaactcagcaagtcttgatttgttgaattcaagctcaatttgatttaattcttccattgtaggacgaaggatcatcagcataaaatcagctttttggccgacgatgctgtaaagagtttgcgatccttttccttctttttgggctacgccccatttttcaagcaacccagtgaattcatgtatgatagattggcgctcatcactggacagaagcttccaggaagcccaatccattgtgcggaaatcatgaagcgcataccagccgtcaagcgtttttgcagcttcattcgtcatttgctgttcactcatttatcttcactcccattatcttttcatgattgccttcactataccatagtttatccgattctactgtggagaaaccttgaacatcccttccgtataactccatcaaaatagaagaaactataagggaagattgagtcacttaaattagttagaaaaataagatttttttatgaaagcgctataatggaagttggctgtttgaatttgattggaagaagagtatgctagtaaaagaaagcgtttttgtaactttttgaggaggttttattgtggcagatttattttcaacagtgcaagaaaaagtagctggaaaagacgttaaaattgtatttcctgaaggcttagacgagcgtattttagaagcggtcagcaagcttgcaggaaacaaagtgctgaatccgattgtgatcggcaatgaaaatgagatccaagcaaaagcaaaagaattgaaccttacgctggacggcgttaagatttatgatcctcatacatatgaaggcatggaagaccttgtacaagcattcgtagaacgccgcaaaggcaaagcgacagaagaacaggctcgcaaagcgttattagacgagaactacttcggtacaatgctggtgtacaaaggccttgcagacggactcgtaagcggagctgctcactcgacagctgacactgtccgcccggctcttcaaatcatcaaaacaaaagaaggcgtgaaaaagacttcaggcgtgttcatcatggctcgcggagaagagcaatacgtattcgcagattgcgcgatcaacattgcgcctgacagccaagatcttgccgagattgcgatcgaaagtgccaatacggcaaaaatgttcgacattgagcctcgcgtggcaatgctcagcttctctacaaaaggctcagcaaaatctgatgaaacagaaaaagtagcggatgcagtgaaaatcgcgaaagaaaaagcgcctgaactgacacttgacggcgaattccaatttgatgctgcatttgttccatctgtagctgagaaaaaagcgccggattccgagatcaaaggggacgctaacgtattcgtattcccaagccttgaagcaggaaacatcggctataaaatcgctcagcgtttgggcaactttgaagcggtaggaccaatcctgcaaggtttaaatatgcctgtaaacgacctttcaagaggatgtaacgctgaagatgtttacaatctcgcattaattacagcggcgcaagcactgtaataaaaatgaagacgatggcagctctcgaccgagggctgccttttttgcgcttccgtatagccttctttaccaagacggatgatatgagtacaataaagaaaactaatcataaccatatatttcattaatgacaggggtggggtttttgtattacgacgtgctgaaaacgtttatagcggtggtagaagaaaaaaacttcacaaaagcggcggaaaagctgatgatctcccagcccagcgtcagtctgcatatcaaaaatcttgagaaagaatttcaaacggctcttctgaacaggtcgccaaaacactttacgacaacgccgacaggagacattttatatcaaagagcaaagcaaatggtgtttctctacgaacaagccaaggctgaaatctatgcgcatcatcactatgtgaagggcgaattgaaaatagctgcaagctttacaattggtgagtatattcttccgccgctattggcccagctgcaaaagctgtatccagagctgaacctcgatgtcatgattggcaatacagaggaggtcagcgagcgtgtgcgtatgcttcaggctgatatcgggctgattgaaggacatacaaacgagaatgagctggaaattgaaccgttcatggaggatgaaatgtgcattgccgctccaaatcagcatccgctcgccgggcggaaagagatttcgatcagcgatttgcagaacgaagcgtgggtgacaagagagaaaggctccgggacgagagaatatcttgatcatgtactcagttcaaatggacttcggccgaaatcaatgttcaccatcagcagcaatcaaggtgtaaaggaagcggtgatcaacggcatgggactttcggttctatccagaagcgtactgcataaggatttgatccaccgcgaaatctcaattctgcatattaaagatttctcgttaaaacgcaagctgtcttacattcattctcctctcatggagaatacaaaaaataaagaaatttttattacgatgctgaaaagcaattatcaatcacagctgctgaaatgatataatagttttcgttcaataagcctaacatgaaagggttttacatagatggcaaaccaaccgattgatttactgatgcagccgaaatggagagtcattgaccaatccagtctcggccctttatttgatgcgaagcaatccttcgcaatggatgatacgctgtgcatgtccgtcggaaaaggcgtgtcgccggcgacagcgcgctcatgggtgcaccacgatacaattgtccttggaatacaggatacacgcctcccgtttttgcaggatggtatctccttgctggagagcgaaggataccgtgtgatcgtacgcaattccggcggtcttgccgtcgtattggatgacggtgttttaaatatctctctcatattcgaggacgaaaagaaaggcatcgatatagacaaaggatatgaagcgatggtcgagctgatgagacgaatgctgagaccgtacaacgcaaagatcgaagcctatgaaattgaagggtcttattgtcccggcagctatgacctcagtataaatggcaaaaagttcgccggcatctctcagagacgcgttcgcgggggagtcgctgttcaaatttatctctgtgcggataaaagcggcagtgaaagggccgacttgatcagacgattctatcaagcggcgctgaaagacaaacaaaacgataaaaaaggcgtctatccggaaatacgtccggaaacgatggcgtccttaagtgagcttctgcaaaaagacatctccgtacaagacttaatgttcgctttattgacggaattaaaagcgttaagcacccatctttattcagctggactgtccattgatgaggaaatggaatttgagaaaaaccttatccggatggctgagcggaatgcaaaggtatttgggtgaacgttcttcgcatgccggctgtatatgccggcatgcattttttatcacaagcggcattttaccccaataatcttattttctgataaatccttcttacatacagataaccacagcaaaaagaaaaacgataaaatgacatcagcatccatattaaaggggagaggcagatgaaagggaatatttacagcctttttgtattgattgcggcttttttctgggggaccacgggaaccgttcaggcattggctccagaaagcgccacaccgctggcatttgggacgttcaggttattaataggagggagcgccatgctgcttgcggtttggatcagccgagagcttcacgtgaaaaattggtcatggccgctcgtatttttagccgctgtttgtatggcgtgttaccagccgctgtttttcacagcggttaaagaaacgggaattgcagtgggaactgtgattgccatcggcagtgcgcctatcattgccgggaccctcgaatgggctgtattgaagaaacgcccgcgaaactcctggtggattgcgactgtgctggctttagcgggttgctggcttctgttttccgacagttccaatgttcggattgatgtggctggtgttcttatggcgcttggagcgggtgcttcttttgcaggctatacgctcatcagtaaagcgatgatgaaaacccagcctccgcgagcgacttctgccgttgtattcatgctcagcgccatcttgctgacgccgctattatggcagtcagatatctcgtggatatggaccactagagggctgggaacgagcctttacatcgggttaattgcaacatgtgccgcatactttttgtttgtgaaagggcttaccggggttccggcctcggcggcggtcacgctgtctttagctgaaccgctgacggcttcattgcttggcgtgtttttcataggggaaatgctttcgccttcctcgtggctgggcattgcgcttatgatgctggggcttttggtcatttctgctgcgcctcggaaacaaaaaacggccgaggcagctcacatgtcttaatagattcacataagcttggcctcattttacaagaatagctgatccggctgcaaaatgaggaaattctcttttctcaatagaaaagaggattttgtacatggcgaaaatcccaaaacagctgcccgttttgggatttttctatgtcattccgctaatttttctaaattgccgttccggtccattttgaaggacggagaggcatgttcatcttcttcaaataaaactagctttctggctctgttcataattttcaccaaggtttcataatcttcttggatcgttttttggtctttttcaagcttttgaacttctgcctctagctgctctgttttgttttgcaattcctgattttctttctttaaacgctcgttttccatttttaatgctgatgattgctcgttattgccttcgtaattctgcaggaagcggatcacatcattcatcgtcatctcaggcgcagctgcaggcgtttgaggagacaataagtgtgatagactagctaactcttccttaaagctttcatcaacaaaaggcatatgttcgccagacattaaaggttgctcattttcgacagatggtgtttccattttaaccggctcttccgcagcggtttcttgaatgatttcaggatcaacggcaggaggctgatataataatctttttttcgcgggctgcccgtttccgagcgctctcatccgctgttttcgttgtttcttcgcaagctggagcgctttttcatattgatggcggaccactgcgttccatctgaatccgcaggctgcggatgtccggtttaatttatcgccgacttcttcaaaggcgttcagctgagtgctgccctccctcacatgccgaagcactgtttcggctaaaagcagatcgttttcctctgaccaagcgtcttgtcgctgttttgtcatttatctcaactcccatttttctattcatggtattagaatgtccaggttggaaaatatttatacaaattggctgaaagaataggagatacgaaggatggagcggcttgcaggaacagtcgaatccttgtaaaatggagagtgatgtgatttttttttgaaacgtgattttaggttattcacatagatgaacatagaaatgaagggaagcgtacgtcatggctaatgaatttcgagtgtgtgatgattgccaagccactaatatcaaaacattgctgccgcgtttgaaagaagtggacccggacgcaaaggttgaggtaggatgccaatcttattgcgggcccggacggaaaaaatcatttgcttttgtgaacaatcgcccgctgtcagctccgacagaggatgagctgattgacaaagtaaaaaagaaaataaaaaagtaaaaacatattttttcttagcctcggccctcaggtcaggcttttttgcttcacaagatgtgtttttcatgaagatggaaccaatcgccgggcaaattcaaggatgttttcaaagaatagagtcgatataatagaaacacggctaaaaaaaagagggaatgacgatggcgtatccaaatggaaaattatcagaagaaaaagtgtttaaagatccggtgcaccgctatgttcatgttcgggacaagctgatatgggatttaatcggaacccgtgaatttcagcgtctccgcagaattaagcagctcggaacgacctatttgacgttccatggggctgagcacagccggttcaaccattctctcggtgtctatgaaattgtcagaagaatggttgatgacgtctttaaaggccgccctgaatgggatgacagtgagcgcgaactctgtttggccgcggcgctgcttcatgacctcgggcacgggccgttctcgcattcatttgaaaaggtctttcaccttgaccacgaggattttacaagaggtatcattttgggagacacggaggttaatcaggtgctcagaaaggtgagcccgggtttccctcaggatgttgctgaagtcattgccaaaacatataaaaacaagcaagtggtcagcctgatttcgagtcagattgacgcagaccgcatggattacctccagcgcgacgcatattatacgggcgtcagctacggccattttgatatggagcggattcttcgggtgatgcggccgcgcgaggatcagatcgtcattaaagaaagcggaatgcacgctgtcgaagactatatcatgagccgttaccaaatgtactggcaggtctacttccatcctgtgaccagaagtgcagaggtcattttaacgaagattcttcacagggcgaagcagctgcacgatgaaggctatgtcttcactcacgctccggttcatttctattctatttttgaagggaaattgacactggaggattatgtaaagctggatgaatctattattttgtattacttccaggcctgggaggatgaagaagacgcgattttatccgacttgtgccgcagattcattaaccgccagcttttccaatacgttgaattcaatccgaatgaagaaatgtcggcttattttgagctgacttcattgttcaaagaggcggggatcgatccgagctattatttggtcgttgattcttcatcagatctgccatacgatttttaccgaccgggagaggaagaggagcgtctgccgatccatctcttgacgcaaaacggccaaattaaagagctgtccaggcagtcggctattgtggaatccatctcaggtaaacggcggacggaccacaagctgtactatccaaaggacttgatttgtgacggcactaaacatccggaagcgaaaatgaaaatccggcagctgctgggactgacatagaaattggaaagaaggaaaaaggagatgtcgggaatttgttgaaagaacatgcaaaactgatgaaggtgttctcggattctggagaaatcatcgggcgaaagaagctgcagaaaatgatttatatcgccaagaaaatgcagtttcctttctatgagaaatatgattttcacttttacggaccatattcagaggaactgacgctccagattgaagagctgtgcaaccttggatttctgcatgaggtgaaggaaaaaaagggcggctactttcaataccggtattcgctgactgagacaggctccgcatttttagaccatgctgatctggacatgccggatatgaaaggctatatcgacagtgtaaacagccgttcatcacggtttttagagctggtttccacgatcctttactttgacgggcttgaggatgaggaaaagaaagaaaaagtctttaccatcaaaagcaagcaaaaatatacaaatgaagaatatgacgaagcgcttcaatacatagaggaactgaagcagatttgttaaccataccaagcaaaagaaatgaatcgtttcttttgctttttttattgacaaaagctgctaagagattcattatggataatagttatccataatgagtcaggagtgaataggatgaaaatgaaatcaggaatggagcaggcggtttctgtgctgctgttactgtcacggctgcctgtacaggcttctttgacgtcagaggctataagccagcgattgcgcgtgtctccgtcttacttgaagaagctgatgagaacattagttcaagccggtttggcagaatccttaccagggacgaagggcggttttaccctgacgaagcctttggcggacattacgctttatgatgtttatcaagcggtcgaaggcagaggttcgatgtatcaggggaaaggcctgctgcaatctgtatttgagggtgaaagtcactgtgtgctggagacagtcatgggggaaatcgaggataaatggtccaatcttatgagagaagaatccttgcagcatgtcatggacagagtcggggaattgtatgatcttgaaaaaatagatgattgggtaatcaagcaagtgaaagggcaattgtaatgaaaaatagcgggtctatacaagaatcaacatcatcaacaggcatatccgtgctgatcgtgctcgcacttggtttcctcatggcaactcttgatgtgaccgttgtgaatgtggcgatggctgatatgaaaaacactctttcaatgtcactttcaggtgtaacgtgggttgtggacgggtacattcttacttttgcgtcgcttctgctggcgggcggagccttgggtgaccgtttcggctcgaagacgatctatatcttgggtctagccgtttttgttctggcctcctgtctatgcgctgcatctataaatgggcagatgctgattgccggacgtctcatacagggaattggagcagctttgtttatgccaagctcactcagccttttggctgcctcttaccctgatgagcgggtgcgggcgagaatgtttgggctgtgggccgcgcttgtttccgccgcttcagcccttgggccctttatcgggggcgtgctggtagagttggcgggctggcagagtatttttctaatcaatgtgccaataggggctgctacgctcatttcagcttaccgaatcctcagccgcgttccgggaaaaagcagccgcgtgaacatcatcgggcatctgcttggcatgatggctctcgggtttctttcctatgctttgatacaggggccttcagcgggctggcgctcgccagtgattcttgcagcatttactgcagcgattttggcatttgtgctgtttttgctgcgggaaatttctgcaaaagcacccatcctgccggcgtccttatacaaaaacggccgcttctcagctgcccaatttatcgggtttttgctgaatttcgccctttttggcggcatgtttatgctcagcctttttttgcaggaagcaggaggcacaagttcctttatggctggagtggagctgctgccgatgatggcggtcttcgtgatcggcaatctgctgtttgcccgtctggcgaatcggtttgaagccggtcagcttatgtttgtatcaatgtcggtcagctgtatcattgcattgctgttgtttgtgctgatttctccggattttccttattggcagctggcggtgttgatgtctgttatgaacctctgtaccggtattacagttcctgccatgacaactgtgatcatgcaggctgccgggcaaagacatgcgaatatcgccggtgcggcgttaaatgcaaaccggcaaatcggagccttggtcggcgtagcgataaccggggtgatcattcatctgtccgccacttggtatgctggtgccgggtttacgtttttgatgatgggagcggcatacagcctcgctgcattgcttgtatggctgtttctggctgcccataacgggactgccgcgtcagaaaaaaatgtaaatcactgattgcgctttgtgggaatatatagtaagatataaaaaattattgaaacaacaggcactgataaggacacgagatgctttttacggtttccagagagggaaggacagctgagatcttcctaacgcagggaaagcagcttaccgcctttgagccgtatcggggaaaacaagtatctgataccgtcatgctgcgttacagcatctttaagccgatcaccatgtgtaattgatcgggaatttgggtggaaccacggatgatcaacacattcgtcccttttagagggatgggtgtgtttttttatatgaactacataaatgcgttgaaaaggacacgaatgatagttacggttttcagagagggaaggaaaggtgagagcttcccagcttaggaatatcatttaccgccttggagcagcattggggaactgaagtaaccaatgccgtctatgctgcgttacagcaccgagccgacaacatagtatttgtcgggaacttgggtggaaccacgggttaatcacacactcgtccctatctgtgggacgggtgtgtttttttatgaattgaatacatgcgatgaaaaggacatgaatgatagttacggttttcagagagggaaggaaaggtgagagcttcccagcttaggaatatcatttaccgccttggagcagcattggggaactgaagtaaccaatgccgtctatgctgcgttacagcaccgagccgacaacatagtatttgtcgggaacttgggtggaaccacgggttaatcacacactcgtccctatctgcgggacgggtgtgtttttttatatacaacaatgaataaggagtgttctaaaatgagcaaacatgtacacattcagcttccggacggacagatccaggaatatccgaaaggcatcacaatcaaagaagcggctggttctatcagttccagtctgcaaaagaaggcggccgcaggtcaggtcaacggcaagcttgttgatctcagtttcaagctggaggaggatgctgagctttcgattgtcacactcgattcacaagaaggcttgcaggtgcttcgccacacaacagcgcacgtgctggcccaagcagtaaaacggctgtacggcgaagtgtcattgggggtagggcctgtgattctagacggcttctactatgacatgaagctggggaaaagcttggcatcaggagacttagaggccatcgaaaaagaaatgaaaaacataataaatgagaaccttgaaatcaaacgtatagaggtttcttacgaagaagctgaagagctgtttgcacaaaaagacgagcggctcaagcttgagattttaaagtatattccgcgcggggaggatatcacactgtaccagcaaggggaattcgttgacctgtgccgcggaccgcatcttccttctacagggatgatcaaggcgttcaaactgacaagagtatcaggcgcttattggcgcggagacagcaaaaatgaagtcctgcagcgggtgtacggggttgcgtttcaaaagaaaaaagatttggatgcgcacctgcatatgctggaagaagcggcaaaacgagaccatcgcaagctcggcaaacagttaggactgtttatgttttctgaagaagcgccggggatgccgttttatttgccgaaagggcagattgtccgcaatgagctggagcgcttctcgcgtgagctgcaaacaaatgccggctacgatgaggtgcgtacgccgtttatgatgaatcagcggttatgggagcagtcaggccattgggaccattatcgcgacaatatgtacttttcagaagtggatgatacaagattcgcaatgaagccgatgaattgccccggccacatgctcatctttaaaaacagcctgtattcttatcgggatctgccgattcgcatggcggaattcggacaggtgcaccgccatgaatacagcggcgctttaaacggaatgcttcgcgttcggacgttctgtcaggatgacgcccatattttcgttcgggaggatcagattgagagtgagatcaaagaagcgattcggctgattgatgaggtatatcggacatttggtttcgagtattcagttgagctttcgactcgcccggaggattcattaggcgatgacagcctttgggaagcgtcggaacatgccttagcacgcgtccttgaggagcttggcctctcttatgagatcaatgaaggtgatggggcgttttacgggccgaaaattgatttccacataaaagatgccctgaaacggagccaccaatgtgcgacaattcagcttgattttcaaatgccggaaaaatttgatttaacatatatcaacgaacacaatgaaaaggttcgtcccgttgtcatccacagagcggttttcggctcgatcgaccgtttcttcggtattttgatcgagcattacggcggggctttcccagtctggctcgcaccggtccaggttcaaatcataccggtttcgcacgttcacttagactattgcagaaaggtgcaggcggagctgaagcaggcagggataagagccggcattgatgagcgcaatgagaagctgggctataaaatcagagaatcgcaggtgcaaaaaattccgtacgtgctggtgcttggagatcatgaggagcaggagaatgcggtaaacgtccgccgattcggacatcagcagaatgaacacgtttcttttcagacattcaaagataagcttgtgaaacaggtggaaaatcgaggcatgtaggataaaagctgtgaattcacattttgcttttttgactttccctattcggaatcagtaaaataataagtaaatcatatcgttcgtatgttatgaatgcatctcgaaatggggaaatttacatggaccatgacaaactggaagcaaatttgctggatcacgcacttacaaaatatttgaaaagcacgaagcaattagatgaagccaccgttccgaaacacgtgaataatgtaagaggatttattctgcggatcatatacagacatgggagctgcaccataaaggatattttgaaggaggtcacactgtctccctctgccacgaccacagctctgaatcatttagagcaggaagggtttattgagagatccagaaataataatgaccgccgcactgtatggattacgctttctgaatcgggccggggagcggctgaacaaatgattgaaaaccgccagcagctgattgacggcatgtttgaacgtttaacagccgaagagaaagagacgttcttggcgattattgcgaagctggctcaatagggataataaaagccggtgcgcgaagcgccggctttatagagattattccatatcgctcaggcgtttgcctgcgacggcataatggtcttttctcatttcttctataaagacaacaattttttcttcagaagcaccggttgtttcctttacggcttctgttactttctcgacaagattgcgtttttgctcgtctgtacggccttcgagcattttgacagttacgtatggcatgggtgctgaatcctcctttatctcgtttcctctctttagaaaaagaggcttcttatagtatactgaataaagtaaattcttgcattttgagaaagagggatatctcacttggaccgttttttatattatccgttatctttaatgccatacctcgtcatcacgctaattgtgtcgtttacgatgcacgagcttgcccacgcttatgtcgcatacaaattcggtgacgatacggcgaaaaaacaaggaagactgacgctgaatcccattaaacaccttgatccgttcggaaccattttgattttggtggccggcttcgggtgggcgcgccccattcccgtgaatcgacgcttctttaagaagcctcggcttgccggtgtgctcgtatctatagccgggcccgtcagtaacctgattcttgcgtttattggtttctttttgttagtgttgatgcatgcgtacggaatggaaatgcttgcggcgttcagcacggggctggatcagtttttttctatttggatacagctgaatcttgtcttgtttttatttaatctgctgccgcttcctccgctcgatggctatcgaattatagaagatctcgttccgccgggcgtgcgtgccaaaatgacgcaggcggagagctacggctttatcgtatttttggtgctgtttgtgacaccgctaggatcttacgtgctgtggccgatgctcaatgcaggaagagattcgattttaaagctgttttcagcgatatttcaaccgcttttgtaggaggtagaacttcatggaagaaaaaaagaaaaaatcaatcgggtttaatattatcaaaagtgatccgacagacggacacggcggttttggcgtaggggcactcagccttgataacatttctcccgtattcgttgatgtagaagaaaaagaagcgttcgtagacatcggcgccatgcatgcccgcagcaccgttgaaaaaggaattaaatttctcccgaataaagaagaagtgccgaacggaaaaccatactggcttgtgtgggtaacgattgacagaaaagaagaggggccttattacgctggtgtgacagcctgtgaaatgacggtcgacagaagcatcagaagaggctacaagtcgctgcctgagcatgtgaatttgatggataaatccatgaaacggaaaatcatcgttgataaaatggacgacagctcgaagcgtgtactaggcgaatttctgaaaaagcatgatcagggcctatgggaccgttcctcagatgagttaaaaacgagcctgcttccggaaaacaattaatttatgaattttctgtgaacttttaaagtatttgagatatttttcgtaaacattgagtaaactggtgatacagaaataggacatggaaaatcccgagccgaaacaagactcggggtttttcatttttagggggatatgatgtacgaaaccattcgagtcggcgattggttgataaaagccgacgtggaagaaacgagaaagcaatatgagaaagatatagaggatatgtgtgaatgcggtaactgtcttaactattacgaggcagtgaatgaactgccagtccaaaaagcacaagtattagaaagtttcggcctcattccgtccaaatgcacagatataaattatcatggggtaaaagatcatctgcacttttatatagcgagttattttatagtaggccgtattgttgaaggaaaacaagaatggaatccgaaaaagattgatttctcgtggcatatttcattttcagtgccgcaacaccaaatttacattcctaagggttttccaaaaccaattattcagctcgattgtgttacgcttcttccatgggtcattgaccaaccatacgaataacccggcctccgaggagccgggttattttcaatgatgtcgccccagccatttgtcccaccattttttctcggaagcgggcttttctttggatggaagccggtcttttgtttgttttgcaggttctgccccgtagcacacgtttgcgggttctgtgcctttcacaaaatatgtgtaatgcttagcggcgcagccgggacctgatgagtagcctgtttccggatcaatgtacacaccggttacgccttttggcggcttgaacgcggtttctggttcgcctttgagcgcgtcctccatgaagtccgcccaaatggttttagcatagcctttttcttcgaccgagtcgatggtgctgtttttgtcatagccagtccaaacacctgcggccagcttcggattgaagccgatcatccagctgtctgcgctggtggttcctgattttccggcatacgttcttgtcaggcggttggctatcgttcgccccgtaaccgacgtatatccatttaaatcggtatcaaacatgcctgtcatcatactcgctgtgacaaaagcggctttttcatcaagcacctgtttatgctgattcgggttttcgtacagcacgtggccggctgcgtccgttacccttgaaataaaagtcggttcgattttctttccgccatttgcgagcatggcataggcgttgaccatctcaatcggacgcacgggttcggtgccgagtgccagagacggcagtgcttgaagatgggcggtaatgccgaattcctttgccgtctttacaagtttgttcgtgccgagaaaaagatgcgttttcacagcgtaaatattgtctgaaagcgccagcgcctgcagaagcgtaatcggcttgttggcatagtatccgttatagttgcttggagaataggtttctccctttgcatcaatttgaaactcggtttcttcgcttttcatcaaagtgactggcgtaaatccgctctgaatcgctttatagtacagcaacggcttgatcgtcgaagcaggctggcgcttcgcctgtgtcgtccggtcaaacgggcttttttgataattcctgccgccgacaagggcgagaacgtttccggtgcggggatcaatggctgaaaacccgacttgaatgtcagagcccgcgttaaccgtttcggtaatggtctcctcggcgatgcgctgcatccgtttatctaccgttgtatagacgtttaacccgctcgtttcaatttgctcccgtgtcatgccgagctttttctccagctctctcatcgcattgtcatagaaataaggggcctttctcttggaaacttgtttattcaaaggctgataggaaagaggttccttgatcaattcatccgctttcttttggctgatcatctgctgcttttccatcatccgcacaatcgttttctggcgttccttggccttcgtctcattgacatacggtgaatagccggaagggcctttcgggatacctgccaaaagcgccgcctccgcatccgtcaggtttttggcatgcttgccgaaatacaggcgggaagctgcttcaatgccgtaggcgccgtgtccgtagtaaatcgtatttaaatagccttctaatatctcgtccttagaatagttttgttccagacggatcgtgtagaacgcctcattccatttccgtttccacgttttgtcgtgttcaaggtataagtttctcgcatattgctgggtgatggtgcttgcaccctgaactttggcaaatgctttcaggtcagcaagcgccgcgccggccatgcgtttataatcaaagccgtgatgatcgtagaaattctggtcttcaatcgccactgtcgcttttacgatcgtcggattcatgtcctttaagggaacccaatagcgcttttcgccgtagttcgtttccccgagctttgagccgtcactcgcatacaaaatcgtggattgcggcacttgcaccgagggagcgccctggtatttggctatcaaaatgacagtcataaacacggcagctgccgccaaggccgcaaaagcccctaaaaagataaaggcgcgaacggttttcagcgtcagtctcagccgtttatttgtcattgcatccacaacgggtttccccctttttttatgtttctactattatgagaaaaaaagatcgtttttaaacatcgcagaacaggacgcatctttactttttccccgccatcctctatactttttccttaggtgaaaatgagatttcaaccgagaataaaagctgattagacgcttacaataaatgaatacagcctcgaaagggagatgacaattgagcgaactttggtacacagagaagcagacgaaaaactttggcattacgatgaaggttaacaaaacgttacatacagaacaaacggagtttcagcatttagaaatggtggaaacagaagagttcggcaacatgctgtttttggacggcatggtgatgacatctgaaaaagacgaattcgtttatcacgaaatggtggcgcatgtgccattatttacgcacccaaatccggagcacgttctcgtagtcggcggcggtgacggcggcgttatcagagaaatcctgaagcacccaagcgtgaaaaaagcgacacttgtagatattgacggcaaggttatcgaatactctaaaaagttccttccttctatcgcaggcaaactggatgatccgcgcgttgacgtgcaggtagatgacggatttatgcacattgcaaaatctgaaaatcaatatgacgtcatcatggtagattcgactgaaccagtcggaccggctgtaaacctgtttacaaaaggattctacgcaggaatcgctaaagcgctgaaagaagacggcatttttgtcgcacagacggacaacccatggtttacaccggaattaatcacaaatgtacagcgcgacgtgaaggaaatcttcccgattacgaagctgtatacggcgaacattccgacatatccaagcggtttgtggacatttacaattggctcgaaaaaatatgatccgcttgcagtggaagacagccgtttcttcgatattgagacgaaatattacacaaaagatattcataaagcggcgtttgttctgccgaaatttgtgagtgacctgattaaataatgaaggtatggcgcaggagcgaatcttgtgcttttttacaggaaagcgagggtattatagatgagatttgatgaagcttattcaggaaaagtatttatcgcgagccgtcccgagtgggaagaggcggacgccattctttacggcatgccgatggactggacagtcagctatcgcccgggctcacgctttggtccaagcagaatccgtgaggtgtcaatcggccttgaggaatacagcccatatttagaccgcgatctggctgacttgaacttctttgacgccggcgacattccgctgccgttcggaaatccgcagcgaagcctggatatgattgaggagtacgtggatagcattttagaaaaagggaagttcccaatgggtatggggggagagcacctcgtgtcatggcctgtcattaaagcgatgtacaagaaatacccagaccttgcgattatccattttgacgcacatacagatcttcgtgttgattatgagggagaaccgctttctcactccacgccgatccgtaaggcggcagaattgatcggaccgcacaatgtgtattcattcggaatccgttccggcatgaaagaagagtttgaatgggcgaaggaaaacggcatgcacatctcaaaatttgaagtgcttgaaccgctgaaagaggtgcttccgaagctggcgggccgtccggtttatgtcacaattgacattgacgtattagaccctgcacacgcaccgggtacaggaacggttgacgccggcggcatcacgtctaaagaactgcttgcatccgtccatgaaattgcgcgttcagaggtaaacgtaaagggcgctgatttagtggaagtcgcaccggtgtatgaccactcagagcaaacggcaaacacagccagcaaaatcatccgtgaaatgctgcttgggtttgtgaaataagtaaacatccagacgatgtctggatgttttttattcccagtctttgcaaacctcaatccacgcttttgagaaagaaaattcggacaattcttccggtgttaattcaatagcggagtttctgctgctgcatgcggggaaaacagtctcaaaccgtttcagcgatacatcaagataaacctcaggatcatgagtctatccaattgggcaaactcctccaatttcatggcctgtctgctccagtacctcattaggagagagcattcttgctttaaagccaaatgtttgcctggactttttgttgtcgatcttggcatcgccggctgccacaatcagaatcacctgatctccttcccctctgaaggacagggacttggcgattctagacaggcttacgccgattgtctcagctgcctgttcaactgtcgcactcgacgtttcgaactccgtcacatcattttctcgattccattgagtaaagtgggttctcacactttttagagacatgctgcatttccactatttttaagattattgaaaaaatcatagaatggattgggagactgggtaaagaggggacaaaaaaaccgccgatggacggcggttaaatcattcctcgttgtgcaacttcaatttggtgtgtaggtgcatttgcaatagttgttgccacgaacacagtgcttagagccagacaagagagtaatagtttagacttcaatttcatacaaactcactcctccttgaataagttgccttacttgttccaccttcaaaaaataagcagaagctttttgaaaatttttacgttcatgataatattttgccacatcaatagcgaaatcttcaagatcagcatacaacattttactttcgagaaaattaaaaaatccttgaattgcttcttcatccgggcctgataagtataaagatttcaaaaattcaaactctgataaatatattacatctccggccttttgtgaataagccattcccttactatgatattcatgagctttatccatttttcctaatttataatggatctgtgtaattaaaaaatacgcttgaggtaaggaaggaagaatatttgattcttcaaaaacagctattgctcttttgaaataaggtatggcatcctcatattggctttggctgtttttacaaagcccgatattgtacaaagttcttcccattaattggggctgcttttcagcttctgccatagaataagctttttgaaaatgtgagatggcatcctcatactgttttaaatctaaaaaattggtggcaaataaagaatgacactgcagcaatcttatattataagcttcattttctttgtatatttcatatgcttgccgtgcatagtccattgaaaaatacgtttgtttcatatagtaataagattcagacatcttaaagaaaaactcagctttctctatccgatccttaacgaatatcagcttgctttcggcctttttgaaaaatttaatagccgacagatattcccgctggtccagctcatacatgcctctgaagaagttaaaatagtactcaagcagaccagttaaacgagcctgttttttatcaatctcaagcagcagatcagacagtctcggctgttcctcaatcctcattttttctaacggttcaaggtactcaagcattaggttgtgccgaaactccatcagtgaatagtacaaatgaaggtcttgatcttcttccatttgatccagctcttgcttgatttctcgtcgcaaatattctgcatcgggtatgctgaatcggcgtatgtacatataccattcgttaatcttttctccgatggaagaagaagatatgacacctgtcacgtttgcaaatccctcccttcataattctatatatgtcatattttatcatcaacattcttgtgagaagcgcaaaaaaaccgcaattttttctttcgttacaccgcatgtttggagatatattttcaaaaagaagcttttaccctcagtaatttgtacaagcaaacacgttactcttccatattctgttatatctgcgtgagcagtgtatgtctgaaaaggaagtgaaggaatgagaaaaaataagctttcctttaaagaaaaagcaggagcagaacaagaagagtgcttatgtttttgtgagggagaagcaagccgagaagccatgtttcaagcgccgattgaattacctgaaggatttgtcgttgatccggctgaagctgttgcaaacgtgacgtggaatgcagacagcctttcttgtgtcagtgaccgttgcttaattcaaacggggccagagcctgatgaggtcggtgttcaatttgcagtgcgcctgcagggaaccgttacgctactcgtcagtgtctcacctgtgcgaaatcaatatggacaaggggacggggctgtttccgtcattcacaatgcagaaatcgatcaagtcgtctattattccgatgaaccggatgattgcccggatatcagtgacatcacgattgagaaccttgttgttgttccgccgttttacggcagtcctttatcggtgacggggacgattgtgcttgtaccggagccggaacccgtctacgcgtttacagcgaatccaaatgatcaatcagtttctgtgattgatacaaacacccatactgttgtgacaacgattgctcttccgtacaatccggcaggtattgaaattacgccagataaaagcgctgtgtttgtcttacatcccaacaataatgtgatttctgtcatcgattatgacacattaacagtgacagcaactatattgctggatcagccgcctcgattgattagatttatccctaatcatgagtttgcttatgttttcaccggtactgccatttatgtgattggaattgatacgttgactgttgagaggtctattcctgtagaaggttttgatattgcaattgaccccaatgggttgttcgcctatgttcttaattttgggttagtgcaaaaagtggacttatctaccggtgaagtcttaggaacgattgaacgagagcttatcgtatcatccatagaaacagattctacggagcggtatgcgtatgtattagaacaagaattcttattcaattatttgacggttattgatttaaatacgtttacgatcagggatacccaagagctggagcctgacgggctatatgtaatgtttacgagtggatcagaggtgtatttacatgacagcttcactggcaatttatattctgtcagtccgaatggagcaggtgtaattggaaatcttccgcaatcagcaacagactttgcgtttaccccgaatggcgagtttctgtatgcaactcatgttctagaacagagcatcactgtttacaacacggatgattactccgtggagactgtcatatctcttggggtttcaccgggagctattgcgatttaatcaactatatgttgtgcatttctaaaaggacgtgaaatcatgaaaaagaatgatctttctgctttacaggaaaattgtttctgtttttgtgatgaggaaattagccgggaagcgccgtttcaagtgccgatagatttccctgagggcttcaaggttgatacggccgaagcgtcagcggctgttacatggagtacagacaatttgtcctgtatcagtgagccttgcttaatccagactgggccggaaccagaagatatcggtgttcgatatgctgtgagagtacaagggaccattacgcttcttgtcagtgtgtcgcctgtgcgaaatcaatatggacaaggcaatggggcggtttctgtgattcatactgaagagattgatcaagttgtttattatgcagcacagtctgaccgctgtcctgattttagtcaaatgacagtggaagatctgctcattgtaccgcctttctacggcagtccgcttacggtgaccgggacacttgttttaccgccatcaccagaccctcaatcatatgtgtttactgccaatactggagacagcacggtttcggttattgatgcagatttaaacactgttgtaaaaacaatccctttttctgacgtgccaactaatctaggcgttactttcgataaagcattcacgtatgtcctccatggaaataccaaccttgtctcagtgattgataataaaacattaaccatcataaataccattactgttggaggagggccgagaaagatcgaatttgatccaacagatgagttcgcatacgtgatggccgccggatctatatatgtgattaacacggcctctcaatcggtcattgatgtcattccgatacccggcgctttagactttgctcttgatccgaatggacagtatgtctataccgctaatggaagcagttggtcggttgataaatatgatgcaaatactgggcagttggtagaaagtatcatagattcatttgaatttcccagtttaattgcaactccttacgctggaaattttgcgtacgtgttgaatggtgagctgtggccgaaaggtgtaacggagattagtttgtctccattaagcaggggaggggacttcagccgtttatttgaaacgctgaggacgattgtattttctctcgatagcactagagcttattttctagagccatatagtgaaccgtttcttattaataacttatatgtagttaatacggccagacagaggatcattgcaaacgtgtctctccccggcgcttttgacctcgccgtaacgccggacaaacagtatatttatgcggcacagcccaacgacaatgctgtgactgtgtaccgcacaagtgattatacagccgtgaaggtgattccggttggcgcggatccgtctgcgattgcaatgtagctattttatagatcaagagaagcggtgctgcgataagagaatcgtttataaataaatgatccgatttgttggatggcagccaggataatcagaaacagaagttcacttatagagaaactgagcatccaccaaatcccggctgctgccagcgctcccgcaaacacttttctgaacaggctgccgtgccggaaaagctgccgcaaatatgttcgcatgcaaaacaataaatacagaatcagtagcatcgcaagtcccattgaaagggcagggggcgtgtgaaggcggaaagggacggctttaacgatttcgaacatgcagccgaatatgatgacttggcacaacacggcagccatcacgtatgtttggcggacgtttttatagctgtcacgcagcgatttgacgtcttctgcatatcggctgcacaagttgtgttgctgaaagtcacagcagctttgatgagactgtgtgagtttctgaaaagctgctgtcatgtttttcacggattgggtgacataatgaagatagagaaaagcaggcagcatcaggagggcagcggtacaagccagcagcccgagccgcacagcatcattgttgatcatctgtacatattgggcggcggcttcggcaacggcctgaacccagccgaaggaataagccgccatacctataagcagcaataaaagggtaaagacagtgttttttttcattgtctgatcgcctctttctgagaaatgtgaatgatcgctttgttagaagatgccattgcatcaatgagagacaagaaaacctgcgcatccatatcttgaatgatgtggtacatgtcaagaaacgagcaatcgcacctgtcacactcggctgcccactcgaagcatttacgcacataatcgctgtcataaatgatcgcgtctgtcaaagagtccttgccgtattgaagccaggcggcaacctgttctttcttctgtgtgacatagtatgaagccacatcgatataagctgaagaatgggtcccttgactgtgaaggatcaagaaaccgccatcctcatatatataagtctcggctgacaagcgatcgatttccaggcggtacgtttgctgaatctcttgaaaaaacggtgaatctaattgaaatagaatacgagccgcgatatcccaataaagctttatcgacaacagatcgttttgcccgggaagtgcgccgatctgtaatccggtccaggtatcttccatccgctcctcatcacccagcatcattttttgtgagaggactggagggcaagccgggatgatttttctttcagcatgataatccggacgcttttccagctggaggtgaggaggcaaaagcgtttctgtattttctgagcccccaatcaaaaacagcgtcatccgatgggcttggtaggcagccttataggctttttgtaaatcactgatgtccagcgcctcaatatcttcgattctgcctgcggggaaaacggcagctggtgaggagggagaaagcatgctgatcagctgataatgatatgagagctgatggttaaggtgtgctgtttgaatttcgcttgtaatcacagctttttcctgagcgacaatcttcttgtcaaatgagtggttccataaagcatcaagcaggatgggaatcgtttgtctgagccgatccggtaatgaggtaaacatgaaattggtatcggtgtaggtagtgaatgcgtttaaaagcgcgccatgcgcaaaaaaatcactgtacagattgcggccgttatgccagaagagaagatgctctaaaaaatgtgctgtgccatacggaagcagtgtatcaccggattctgcccgtatacatacatcccggcttccaaaatcgatttttacattgcacagccgcaggtgggcgcgggggaatttcaatctgaatatttttagtccgctgtctgtgtatctgatatcggttcgttcatccagctgttgaaaaaaggctttcttttccatctcttcatccccttactacatgagctccgatataattgatggtcgctatgaattgcaatacatcacggcatgtaaccgctgagatgccatccagcaaggcttctttcgtgcaggagaagcggcgcaggacccccatataggccaatagaccttcgggagaatcgaattgcagcagcaattcattgcgtaaaaactgctttgcctgttctagttcccgctcatctgtatgaaaagctgagacagcttccaaaacgcgcgggggaatgtctttctcatgaagctgatctgtacatattgaaacaagcagcaaattgttcatgacatcgtaacgggtgataacgtgatagactgccagatccttctctctgaagtgcttgaataaagcggaatggccgtactttcccagtaatccgtctattagctgtattttgatataatcgctggcatctttcatctctccgcagtcaaatccgagtgtcaagacggaaggacctgcagcgctgcgtgtctctgtttcaaaaacatgccggtttacgggtattcttccggacgttacagcggacgtttgcggggcatgtccccgaacatcacatgcttgtacttgtcccaatatgttcagctgtttttgctgggacactaaatcaacgataaagtccgttgcgtcgagaaaccgtttaggatgaatcgcctttatcctgtctctccggccaaacatgcctgtgccgtacatcgggtttccgaagacctcctcagccaagcgcgccgccgagtaggagaaaggatcagtgaatttcttttcgattctcagcagcagctcattcctggccttttcaactgcttcgaatgaaagagaagaagggaaagacaagtctgcaaaagttttcagcagggcgtcaacatgaagattcccgttatataatgggtgaatcaaacgggtcccgcaggttttcagctgctgatcaaaaaagagattcgctgagtacatgaaacggctgccggcagcacaaccgaaagcgtcaatgatttgctccttcaggtacgcggcggcgccgtaaaaataaattgtttcttcctcaggttccgccgcgctttcgatcggtttcagaaagctcgcggcgattgatatagttgaaaattgatgagtcttcagcaggttaacttccaagccgttctcttttgcttgtatcaaagaaaccaccatcctgtttttgcaggtaatagactatgaccagaccggctatcggaatgaccgccaaggatacagcggtgccggctaatgtggctaagaataggggaagacaaaacagataagaccgatattttgagaaaccgctccatagctgctgctccgtctgccagctgaaggagggccttttttcatccgcagttaacctgataaaagctcccgccagcagcaactcaatgcactgcaaaaaagtgagaactgaaatcggacggccgctgatgaaacccacaatcatcacgacaaggagaaatccgcctgccaataggcctgaataaaagcgatatttcgcccaaaacatcgttttccgcttgatcggaagcgtgatgagcaacatccggtcatttttttcaatcgagtacaaaagggcgatcggcgagcagatgagcaaaagcgcggaaatcacgatataaatcacttgctgattgaagatgccggtgttcatcatctggaacgaaaagaagccgctgaataccgccattaccgcgtaatttaacagcatcgctttagaagagataaatcggttccattctcttttgtaaaacgaaaattcagatcgccgcataaatgaatgcatcttgccctgctgcggaggcgcctgcagaaagacaggaaagtcaatgatcaccgcccacagcatatgaaccgcgcaaagcggaagcgtggtggccggcatcaaagcggcgctgagacatacacaggcgaatatcgccgcatgcagcagaaacatcaagttcttctttttgacgaagtggttgcttagcacaactccgaaaataatggagtaaacggtaaaaaacgaaaacctgccgagccaaaacaatgtttgcgcccctgacagcgttccgtttccaaataagaacagcggtaaaataaaaaagaataaagttcttctcaaacaggtatcgacaaacaaaacgacactctgggcgagccaaaagctccgtgaagaaatcggcagcaggcagctcagtttcatataagattccttccattgagatgtcacagaaagaaacaccatatatgcgttcattaagagaagcgcgagtatgatatacgttttgcgcaacaccgattcatcaatgccggcctggcggatcagcccaatttcaaacacggccagaatgacaaggcctgcggcaatgcggatggcatcctttttcccttgccggctgtaaagctgtttgaacagcaaagacatgatagggattatgttattcatggccgatcacctcaaaaaattcccgccgcagatcggtctcctctccaatcggaatgaccttttgaatctgtttgttgtgaagaatagccgcataatcacaaaatctttgcacgacatcgagcagatgagaagaaaacaaaatggtcccgcctgcttcacagtactcgcgcattttctgataaaaaacctctatcgattccacatccaaaccgacgagcggctcatccaaaataaacaggggagcgcgcagcaataagcctgtcatcaatacaaccttttgcctgttccccaaggacagctccgaaattctcctgttgatgtatttcgaaaaatgaaaggcctcggccaaactggcaaactgctgctctgaaaaatccttttgataaagcgaatggacgaaagacacatagtccttcgccgtaatttctgtaaatagcagcggataatcggcggcgaagtaacggtgagtcttcagctgatctgatgttttctgcggcatgccggcctccgcttcaattccgcacagtgtaaagcgcccgctgaaattgcggttcacgcctgtcagcgtattaatcagtgtcgtttttccggcgccgtttaccccaagcaacccgtaaacggcgcctttttctaaatgtaaatccacttgttctaagatgacgttgtcccgttcataccaaacggatacatcgtgtatatccaaaatgctcatcgcgagtcagccttccgcgcgcgcatcccgaacagaatggcaatggcaatgaaaatcagcgtaaacagataatcgcttttgacaaaatagacgactgcgccgatgacaaagataaatgaaaggatatacagtaaaattcttctttgtgctggtgacaaatcgtttccctcctaaataagctggaccacgtcttctaattgttcatttttcgcccaagagcaaatgttttttcggtgatatttgttagagttcagcccttttaagtaacagcctccgcaatagccgctgaacgggcatttgtctttcatgcaatgttcgctgaaccgcggtgcttgcgcttgccacagtttatggacgagaggggagttaaagatgctttcataggaatcatgaaaaatatttcccaatgaaaattcctttggaaagagggcgcaaggacgtacttcgccgaacgggctgatcacaatggacttccagccagcgccgcaatttgccgcgcgttttctctcataaggaataatcggaatcaaatctttaaactcatcaattacattttgctcgtattccataaacttgcggtgctgctcggcgtctttcgttggatggacaatatccctgcctcttccgaaatcgtcaacccaattgtaagagaacgccttcgctccgagatcccgaaccttttgggccatatcgtggatttcccacatgtttttttcgaagacagacatggcgactctgacaaatataccgtggtcactcaacaattttatcgttttacaagtttgggcaaaagagccttttctccctctaaaggagtcatggacctcggaattgacactatcaagagaaatgccgacgatgattttttgcttgtaagccttcaaaagctccaaactctcttttcgcatgagtgttccgtttgttaagacagcgacttttttgaactttttacacacatagtcaagaatctcattggcgtttggatggacaaaaatttctccgcctgtgatttcgcatgtcaatacaccgttatcaaacagcatatcagccgtttttttgaattgctcaatcgacacggtgccgagcgcttcaggtgagctttccaaataacagtgggcgcatttcaaattacagcggtgcgtcagttcaaaggtggcgtggagcggcatcggaaattcattgcttccgctcgtggtgattgtatggcggctggcccggtttccaagctgaataacctgcttgttctggagcatgttgagcatgtcgtaataccaatctttatggtcttccggtgattcatcatacactgcacattgctcagctaaaatctgctcagctgttttttggccatccatgcgcatgcagagctcgtaagccgttttgttgagatccaaatactcgaagtcagaaatggagacattatcgcgcaagtagtcgatttctaacacgccgccctcaggaagctggtgaactcttacactttcattaataaatggaaacatctgctctataaacaaaataccatcccctatacatatgattcaaatgaaaaacggttgtgtatgtatatccaagaggtagattttagttaaaaattgtaatttacttaaaaagggcatagtagaatgactatgcccttttgggagatccttacccccatagaccgaatagacctgttgcaccggcaatttcaaaatcagggataggaccgtccactagacaagcggctccgatcgagcatgttgcacaacctttgttttctacaatgacagcttttttcataattgaatcctccctttttttgtttttctagcagatctatgttgtacttttatcttaaaactatcaaattactaattcaatacatataatttgaaaaaaatgtgaaaagaaaatgatagatttcggaaaaatgtaacatttcctaaaggtaattagtgatatgattttctcttctatataaggaaatgctttttatgaggtttatcttcaaatctgatgagcaatgatggtaagatagaagcagttgaagtttacaaaccgaatgattatactattcaagtcaaagtggaatgatgaaaaggacgtgtcagaatgaagcaagagacaccgataacactccatgtgaagtctgtgatcgaggatgacggaaaccaagaagtcatcgaattccgcaccaccggattttactatgtaaaacaaaataaagtgtatctatcttattatgaagaacacgacttaggcaaagtcaaaacgattgtgaaagtaagcgaaggcgaagtcctggtcatgaggtcaggcgctgtcaaaatgaatcagcgtttcgtaacgggagcttccacaattgctaaatataaaatgtcatttggtgagcttgagctgaaaacaagcacaaaatcgattcaatctgatctcgatgaagaaaaaggccgtatcagcatcgcatatgacatgcatgtcggagacgagcaggagcatttacataatatgacgatcacgtatgagggaggaactcacgcatgaacattgcggaacaaatgaaggacgtgctgaaagaagaaattaaagcggccgttctgaaagcgggactggctgaagaaagccagattcccaatgttgttttagaaacaccgaaagataaaacacacggcgactactcaacgaatatggcgatgcagctggcaagagtggcaaaaaaagcgccgcgtcaaatcgctgaagagattgtcgcccattttgataaagggaaggcttcgattgaaaaactggatatcgccggcccgggttttatcaatttctatatgaacaatcagtatttaacaaagctgattccgtctgtactggaagcaggggaagcatacggggaaacgaacatcggaaacggtgaacgagttcaggtagaattcgtatcagcgaatccgacgggagaccttcacctcgggcatgcgcgcggggcggctgtcggcgattccttgtgcaacgtgctttcaaaagcgggttacgatgtaagccgcgaatactacattaacgatgcgggaaaccaaatcaacaatctggcgctttctgttgaagtccgttactttgaagcactcggattggaaaaaccgatgccggaggatggctaccgcggtgaggatatcattgcgatcggaaagcgtctcgctgaggaatacggtgatcgtttcgttaacgaagaggaaagtgaacgcctcgcgtttttccgtgaatacggcctgaaatacgagctggaaaagcttcgcaaggacttggaaaacttccgtgtgccgtttgatgtgtggtattcagaaacttcactgtaccaaaatggaaaaattgacaaggcgcttgaagcgctccgcgaaaaaggccatgtctatgaagaagacggcgcgacttggttccgttccacgacgttcggcgatgataaagaccgcgtattgatcaagaaggacggcacgtacacgtacctgcttcctgatatcgcgtatcataaggacaagcttgaccgcggctttgataagctgatcaacgtttggggcgccgatcaccacggctacatcccgcgtatgaaagcggcaattgaagcgctgggctatgaaaaaggaacgcttgaagtagaaatcattcagctcgttcacctttacaaaaacggcgagaaaatgaaaatgagcaaacggaccggtaaagccgtaacgatgcgtgacctgattgaagaagtcggcttggatgccgttcgttacttctttgcgatgcgaagtgcggacacccatatggattttgacttagatcttgctgtatcaacatctaacgaaaaccccgtgtattatgcacaatacgcgcatgcccgtatttgcagcatgcttcgccaaggggaagagcagggacttaaaccggctgcagatcttgatttcagccatattcaatcagaaaaagaatacgatctgctgaaaacgatcggcggcttcccagaggcagtggcggaagcagcggaaaaacgaattccgcaccgtgtcactaactatatttatgatctggcttctgctctgcacagcttctacaatgcagagaaagtcatcgaccctgaaaatgaagagaaaagccgcgcgcgcctggctttaatgaaggcaacgcaaattacgctgaacaatgcgcttcagctgatcggcgtatcggctccggaaaaaatgtaatcacgatcaaaaggacaaagtcttcgggctttgtcctttttttatgagaaaaacgtgtgatgtaattcacaatcctgtttgccgagtttttgtatgataagactgattattgaatcattgaaaggggcaagccaaatgatcaaccgtcaacacattcaattatcgttacagtcattaagcttggtggcagggtttatggtttgggtgctgatttcatcactcatttcccaaatcacattagatattcatttaagcaagggcgagatttctttggtgacggcgattcccgttatcctcgggtcgcttcttcgcattcctctagggtatttaacgaacaggtttggcgcgcggctgatgtttatgatcagtttcatcctgcttttatttcctgtattttggatcagtatcgcggattctctgtttgatttaatcgccggcggctttttcttagggatcgggggagcggtgttttccattggagtgacctccctcccgaaatattatccgaaagaaaagcacggtgtcgtcaatgggatttacggtgcaggaaatatcgggacagccgttacgacatttgcagcgccggttatcgctcaagccgtcgggtggaaatcaaccgtgcagatgtatctggttttgctggctgtctttgccttactgcacgttttgttcggtgacaggcatgagaagaaggtcaaagtttctgttaagactcaaatcaaagccgtttaccgaaatcatgtgctatggtttctgagcctgttttattttattacgttcggtgcctttgtcgccttcactatctatctgccgaactttctggtggagcattttgggctgaatcctgcagatgccggcttgcggacggctggctttattgcggtttctacgctgctcaggcctgcgggcggattcctggctgataaaatgagcccgctccgcatcttgatgtttgtttttgccgggcttacattatcaggcattatcctatcgttctcgccgacaatcggcctttatacgtttggatcattaaccgtggccgtctgctcaggcataggaaacgggactgtttttaaactggtgcctttctatttttcgaagcaagcggggattgccaatgggattgtgtctgccatgggcggattaggcggcttttttcctccgctcatattggcgagtgtgtttcaggcaacaggccagtacgcgatcgggtttatggcgctttcagaggtggcgttagccagctttgtccttgtcatatggatgtattggcaggaaagaatgaaaacacacacggagagaaacagccagagcatcaactaacactggggcattcacaagattgttagttttttctcgatgggtacaaatcaattcacgttacaataaacacacaacgtgactttcttcgaggtgagctcatgaattttctctctgttcgaccatctgatagagatcttatatccagcgatctgcatgaattgctggaatcgatcagcacgaaaagaaaaatggaaaaacacacgtatttgtttcgagaaggaatggatgcagaagagctttatctgattcaatcaggactcattgaaatcggcaagctgacatctgacggaaaagacctgacgcttagaatctgccaaaagcatgatatcgtcggagaattaacacttttcactgaagaaccgaggtatatgctcagtgcaaaagtgctagaggatggcgaggtgctcgtcattaataaaaataagctggaaaaagaattaatccaaaacggcgctttaacatttgagttcatgaaatggatgagcacgcacctccggaagattcagtccaaaatcagggatctgcttcttcatggcaaaaagggggcgctctattctacccttatccgtttatcaaacagctacggagtggagcgaagcgacggcattctgattaacattgtcctgacaaatcaggatttggcaaagttttgcgcggctgcacgggaaagcatcaaccgtatgctgggagatctccgcaaaaaaggggttatttcgatagacgaatccggaaaaattattttgcacaagcgggactatttacgatgtgagattgagtgtgaaaattgcccgctggagatttgcaatattgactgaaaaaaacaaggacagcggtgtccttgtttttttaccttgtgataaacaggcacatgacggcaagaaagaagcaggcattcacgatttccagaatgccaatcgtttttacgggccaatcccttccatgaaaaaaccatgcccgcaagctgctcgggataaaagcgagaaacgcccatcctgctccgaaaagagcggataaaaaggggagcagcaggtgatatccccatgaccagtatgcaaatgccctgttttttctctcgcggatcaccgatttcacataaaaggaactcccgataaaaaataaagcagactgcaagaaaataaaccaagcccagccgtcaagggttcccatccccagccagcagctcgcaaacccgcccgaacaaaagaacaagacacctgcaacatcattcaataaggctcgttcgttttttctgcgggcaaaatacatatgtatgagaaacagcggcagtaaagaaacgcccacccagatgagaggcggcttatgaaagaccgagatcatcaaaaagcagcaggcgggaaaaccgtaataacacatccacttttgatatggtttgctttgtttcttttttaaggcaagcgtaacgggataaaccgctaagtataggaaaagccaaccaaggaagagcggaatatgccaaataacggggcctcccttgaccatgccgagtaaaaatgggatcagcagcatcgcccacgccccgtgctgcttcggaatcagcgccttcatcgaaatcctccttttttctttcattataaatgcattcaccctcctgataagtgacattcatcatacaggctgtgaaatacatcactgctgtacaggctcagtcgagctacactaaagctatccttagcacaggaggttttcctatgaatcagtgtgactatttattatttctgaaacaacttcctatgtttaatgaagtgcctctatccattgtcgaaaccttgctgaaaaacggcacgtttatccgcggttcatgtgatcagtctccatcttttcttcattctcaatctgtttatattgtattaaaaggcagtgtccgttttatggacacaaggctccctgaagggtcgaaaaccgttgcgctgtgggaaaaaggcgatgtgtttccgattgatgaaaaaggcgggctttatttatcgccctttatctcagtcaatgccacttcagacattctgattctcaacatcccatattacatatttaagaaaatgatgtcttatcatccgcagctgcaaatgaactttttggctatgcttcagcaaaatgttttttgttcctatcaattatttttgcggtatctgcatacatcacaggatgaaaacgccgagcccggttcttaaatagagccggtttttttgatctttgaaaggcggctaatgacccaagcgttctgcctgaacgcagccttcctcacatcttgtgaaaatccttccttctcctttgtgtgaacattttgtgaaaaaagcagagtgtgtgacatagttcacaaggaaatgcgctgtctctgtttatagtgaacttagcatcacctgactcggaaggagtgaactctcatgaagaaaaagaaaatgagtccgttgtttaggagattgaattatttctctcctatcgaacaccattcaaataaacatagccaaactacccgcgaggatcgcgattgggagaatgtatacagaaacagatggcagtacgacaaagtcgttcgctccacccacggcgtcaactgtacagggtcttgcagctggaatatttatgtgaaaaacggaattgtcacgtgggaagggcaaaatttgaattatccatcaacaggcccggatatgcctgattttgaaccgagaggctgcccgcggggggccagtttttcatggtatatctacagcccgctccgtgtgaaatatccatacgtgcgcggtgtgctgatcaatttgtggcgggaggcattgcagacgcatcaaaatccattggaagcctggaaatcgatcgtcgaaaaccctgaaaaagcgaagtcctataaacaggcgagagggaaaggcggttttgtgcgcgctgaatggccggaggtgctgaagctgatttcagcctctctgctgtatacagtgatgaaatacgggcctgaccgaaacgtcggtttttctccgattccggccatgtccatgatcagccatgcatcaggctcccggtttatgtcgttaatcggaggccctatgctcagtttttatgactggtatgcggatcttcctccggcatccccgcaaatttggggtgaccagacggacgttccggaaagcagtgattggtacaattccggctatatcatcacatggggctccaacgttccgttaacgagaacgcctgacgcgcattttttggcggaggcccgctataaaggcgctaaggtcatttcgatcagtccggattttgcggaatcctcaaagttcgcggatgactggctgagtattcgccaagggactgacggggcgcttgcgatggcgatgggtcacgtcattttgcaggaattttacgtgaaccaagaaactgaacgttttattgagtacgcgaagcaatacactgattttccatttctcgtcaccctgtcaaaagaaaatggcgtatacacagcgggacggtttctgcatgcgaaggacatcgggcggcagacaaagcatgatcagtggaagcctgcggtttgggatgaacagacaagttcatttgccataccccaagggacaatgggctcgcgctgggacgggcagcagaaatggaacctgcacatgattgatgaagaaaccggggaaccgattgaaccccgtctctctgtgctgggaatagaggacgaaatcggcacggtgcgcatcccgtatttttcaaatgacggaaacaaagtgctcgagcgggatcttcctattaaaaaaatgaacctgaacggtgaagaaacgtacatcacgaccgtgtttgacttgatactggctaactacggcgtgaaccggggcatcggcgaacgatcggctgtctcctatgatgatcctgagccgtttacgcctgcctggcaggaacaaatgacaggaatcaaaaaagaagctgtcgttaagattgccagagagtttgcccaaaatgcgatcgatacagacggccggtccatgattatcgtaggggccggcattaaccactggttcaactccgacacgatctaccgagcggtgttaaatcttgttttacttgtaggcgcccaaggcgtaaacggcggaggctgggcccattacgtggggcaggaaaagctccgacctgctgaagggtggcagacgattgcaactgcaaaagactgggaaggcgtgcctaagctgcaaaacggcacctcatttttctactttgcgacagatcagtggcgttatgaggaccagccgatcagtgatttggcatcaccgattgctgcgtcatcccgctacaagcaccacgctgattacaatgtgctggcggcgcggctggggtggcttccgtcttacccgactttcaatcaaaatggcatcgatctgtataaagaagctgaaaaagcaggggcagtaacacccgaagacgtaggtgcgtacgtggcctcacagcttcaagagaaaaaactgaaattcgcgattgaagatcctgataatgaagtgaatttcccaagaaatctcttcgtatggcgggcaaatctgatctcaagctcaggaaaagggcatgaatattttctcaagcatttgttagggacgacgaacggcttgatgaatgacgacagcgacagcatccgccctgaagaaatcaaatggcgggagcaggcgccggaaggaaagctcgacttgttaatcaatcttgacttccgaatggccggtacggcgctgtattccgatatcgtgctgccggcggcgacatggtatgaaaaacacgatctcagcagcacagatatgcatccgttcattcatccatttgctcctgcgatctcggctccgtgggaatcgaagtcagactgggatattttcaaggcgttgtcaaaagccgtttccgatctggcagaagaagtcgatatggagcccgtgaaagaagtggttgcgacgccgctcctccatgacaccatgcaggaattggcccagccattcggcaaaatcaatgactggagcaaaggcgaatgtgaagccattccgggaaaaacgatgccgaacatccaagtcgttgaacgggattacaaacacatttttcataaaatgactgcacttggtccgaacgttgctttaaagccgagcggaacaaaagggatgagctggtcaatagccgatgaatatgaatcactcaaacagagattgggagaaatcacctcggacagtgtcgcaaagggatgtccaaatataagtgaagcaaagcaggcagcagaagcgattttaaccctatcatccacttcgaatggaaaggtcgccgtcaaagcatgggaatcacttgaaaacatcacgaacctgaagctgaaagacctggcggaagaacgcgaggaagaatgctttacgttcgaacaaattacagcccagccgaaaacggtgatcacgtctccagcgttttccggctctgaaaaaggagggcgcaggtattcgccgtttacgacgaatgttgaaaaattaatcccgtggcggacgctgacaggcagacaatcctattatgtcgatcatgaactgatgatggaattcggtgaaacgatggcgacattcaaaccgatcctccagcatcgcccgtttctgagcaagcggcctgatcaagagggaaaagaaatcgtcctcaattatttgacgccgcataataaatggtctgtccacagcatgtattttgattctctgccgatgctgacgctgttccgcggcgggccgaccgtgtggatgaataaagatgatgcagaggacacggatatcaaagacaacgattggattgaatgctttaaccgaaacggtgttgtcgtcgcgagagcggttttgtctcatcggattcctaaaggaatggcgtttatgcatcatgcccaggaccgccacatcaacgtgcccggcacaaagctgacgaataaccgcggaggcacccataacagcccgacaaggattcacgtcaagccgacccagatgatcgggggctatgcccagctcagctatggctttaattattacggtccaacggggaatcagcgcgacctgaacgtcgtcatccgcaagctgaaggaggtcgattggcttgaagattaaagcgcaaatcggtatggtcatgaacttggataaatgcatcggctgccacacgtgcagcgtcacctgcaaaaacacgtggacaaaccgttccggtgcggaatatatgtacttcaataatgtagaaacaaagccgggcatcggctacccgaagcaatgggaggaccaggacaaatataaaggcggctggacattgaaaaaaggaaagctcgagctgaaatcgggctcgaaaaccaatcggcttgcaggccttttctataatccgaatcagccgtcgattgatgattactatgaaccctggaactatgattatgaaacattaacgaacagcccgcagaaaaaacaccagccggttgcacgcccgaaatcgtccttgacgggggatttcatgaatatcgaatggggaccgaactgggaggatgatctcgcgggcggccacataacgggacttgaagatcccaacgtacaaaagatggaggaatcgatcaaaacagaattcgatgaggtttttatgatgtatttgccccgtatttgcgagcactgcatcaacccggcgtgcgtctcatcctgtccatccggcgccatgtacaaacgcgaggaggacggcattgtgcttgtggatcaaaacgcatgccgttcatggagatattgcgtctcatcctgtccttataaaaaagtctattttaactggcaaacgaacaaagcggaaaaatgcacactctgctttccgcgtttggaggcgggactgccaaccatctgctctgagacgtgtgttggcagaatccgctacctcggcgtcatgctgtatgacgcggacaaagtggaggaagcggcatctgttgaaaatgaaaaggatctctaccattcccaattggacgtttttcttgatccgaatgatcctgaggttgccaagctggcaaaagaacaaggcattccggctgaatggatagaggctgcgcagcaatcgccgatttataaaatgatcattgactggaagattgcgctgccgcttcatccagagtaccgcaccctgccaatggtgtggtacattccgccgctcagcccgattatgaatctctttgaaggaaaaggcagccggcaatccgcggaagatatttttctggctatcgaccaaatgagaatcccgatagattatttggcgcagctgttaacagccggtgatacggatcatattcggtcaacgttgaagaaaatgtctgtcatgcgccagtatatgagagcgatccagacgaataaatcaatcgacccggaactgatctccagtgtcggcttaacagaacagcaaattgaagatatgtatcggctgcttgcgattgccaaatatgatgaccgctttgtgataccgagcagtcatcgagaagaagtttcagatttatatgctgaacaagggagctgcggcttatcattttcaggcggccccggctcctgtttctaacttttgataaatgaggtgtaacaagatgaacaccacagaccggcaaattacgttctccgctctatccactcttctctcttatccggatgaagagtggagagccgagattcccgattggaaggctcttatccatgaaatcagcaaccggcaaatccgggagaagctgctgcactttttcgaagcgtcagccagcttttcaccggaagcgctgattgaacactatgtctatacattcgactttgggaaaaaaacaaatatgtatgtcacctactttaactcgggcgagcaaagggaacgcggcgttgaattgctgcatttaaaaaacacatacgagcaatccggtttcctgccgacagagaaagagctgcctgattatctgccgctgatgctggaatttgctgcggctgcagaaattgaagcagcgagaagcgtgtttgagaaatatctgtccaatgtgagggagctggcatcccgtctcgaaaaaaatgacagtatatacgctgaactgctgcacgtgctgctggccgcgcttgaaaacattggcgtacgtgaaagcgttgaaggggctgttcaggcatgagcgggcagatcctctggggtattatgccatacattgtattgacaatctttatcggcggccatatttaccgctaccagcatgaccaatttggctggacggcgaaatcaagcgagatgttagaaaagaaaaaactcgccgcgggcagcacactttttcactggggactgctgtgcgttgtcggcgggcatgtcatggggattctgatcccggaaggcgtgtatgcttcccttggcatttcagagcatatgtatcacaaaatggcgattggcgctggcttgccggcgggcattgcggcatgtaccggacttgtcatcctgacgtacagaaggctgtttgacaaaaggatccgcaaaaccagctcgccatcagatatccttacgctgctcctgctgctgttcatgatgctgtcaggcgttgcggccacgtttctcaatattgattcgaaaggatttgattaccggaccacagtcgggccctggttcagggaaatcgttttgttcaggcctgacgcctctttgatggagagtgtcccgctatggtttaagtttcatattgtaataggatacgtcgtttttatcctgtggccgtttacgagattggttcatgtgttcagtctgccgctcaagtatctgacccgcagctacgttgtatatcggaaacgctcgtgaaaatcccccttgcaagagggggttttttctgccaaggtaatggctgggcggccgggaatcctggaaataacatcaagaataaaacggattttactcattttaaaccggctgaactgcagattatgactcagcctgactaactccttatatctttgtgatcaatatcccgttttatatattttctctcatcagaatgggtatcaaattcactctatccaccgtatttgcagtcacagcgctgcctctttttcggcgcttgccggagtgctgagcgggttcggcctgccgcttatgttgtcactcggcgttgccaatagtcttgctttatttctgcagaaacgatgcggatgaattccgtgacagttagttttctctaaacctctcctcctttggcggagaggttttttgcttacaaggtttatcgattagaaaaaagaggtaatacagaggtaattgaatcagattggagagaatcaggatgctgaaaaggagactggaatttttctttttatatatgatgctcatcggggcatatgtcatttggttttttccggtttccaggcttgagttttacggaggattgctttgctatataagcattattttgttcagcatctattcattaattcttgaaaaccgcacctcgcagcacacgctgctatggatccatattcttgtcttttttccaatcgtcggctacgtgttttatctgttttcgggacagctttatgtaaagggaaagctgtttaagacaaaacgaatgtacaacagggaaaagctcaggaagctgtttgacaaggaggaaacgcccgaagtaacagggctgaaggacaatcaagagaggttctttacctattccatcaaggctgcccatatgaatatcaatacgaaaagcaacatcaaagtgctgaaaaacggcgaagaaaccttcccggacattttcaaagcgatgagaaaagctgaatcttacatacatattgaatactacatgtttaaatcagacatgctcggacgcggcatgatggacattatgatggagaaagcgcgccagggtgtcgaggtgaggtttttatacgatgcggcaggaagcatgaagctggcaagaagagatattatgagaatgaaacaagcgggggtggacatcgtcccgttttctccgctgaaatacgggtttttcaaccagaagctgaatttcagaaatcaccggaaaatcgtgatcatcgatgggaaaaccggttttgtgggcggattaaatgttgggaaggaatatatcagcagagatccgtacatcggattttggagagatacacacctgcggcttgagggggaaattgtgcaaacgctccacgctatctttatgctggattgggaatatgtctccaatgaagtgctaattgatcaagaggagtacaataccccggttcccgtggaaggaggaggcatttatcaaattgtcgcaacaggccctgacatgaaggaaagcatgagcgacctttattatgaaatgatttcttcagcgcagaaatcaatatggatcgccacgccctattttgtccccaatgaatccattcgcacggcgctaaaagcagcggcgacaaagggggtagaggtaagggttatggtgccggagaagaacgacagctttttgacccaatacgcgtcgaggtcctatttcccggagctgctccttgagggcattgaagtgtactcctaccaaaaaggcttcatgcatcaaaaagtcatgatcattgatggcgatctcgcctccgtcggtaccgcgaatatggacatgcgcagctttcagctcaactttgaagtgaatgtgttcttcacggatgccgaagcgatccgaacccttgaggtccattttgaagaggatatgcaggaaagtgaaaagctcagccctgtcggcttttataaaagaggcgtggctgaccggacaaaagagtcatttgcccgcctgttttcaagtgttctgtaagaaaaaagaaatctgatctttcaaaacagcccgtgtatagtataattgagaaatattatcagttatttatacattgggggaagatagggtgctgcggcaatttttttcatattataaaccatataaaacgttgttctttctcgactttttctcagcgatcgcgggaggtttaatggagctgagttttcctttgattgtcaattattttattgataccttgctgccgggcagggactgggggctgatcatcgcgacctcaatcgggttatttgcggtgtacgcgctcagctcttcagtatatcgtgacctactggggacacatgcttggtatcaatattgagactgatatgagaaagtcgctttttgaccatttgcaaaagctctcgttcaaattttacgacaacaacaagacgggaacgctgatgtcgaagctcacgaacgatttaatgtatatcggtgaagtcgcccatcacggtccggaagacttattcattgcggtcatgaccattctaggggcgttcggagtgatgctgtttattaactggcagcttgctttattaacgtttatcattatgccgatcgtcatttggctagcgctttatttcaacaaaaaaatgaccaaagcatttaccacgctgaacaaggatatcggagacttcagcgcgcgtgtagaaaataacatcggcggcatccggcttgtgcaggcgttcggaaatgaagcatttgaaaaagaacgcttcgccgtcaacaaccagcgtttccgtgcaacaaagctttcttcctacaaaatcatggcgaaaaacgggtcaatcagctatatgctgacacggtttgtcacgctgtttgttcttttgtgcgggacgtggtttgtcattcgcggctccttatcgtacggggaatttgtggcgtttgtgctcctgacgaatgtgctgttcaggcctattgacaaaattaatgccattatcgaaatgtatccgagggggatcgccggtttcaaaagctatatggagctcatggagacagagccggacattcaggattcacctgatgcgagagatgtttccggcctgaagggcaatatccgctataaacatgtttcgtttggctatgatggccatcacaatgtcctcaatgacatcaacctatccattcaagcgggggaaacggtggcgttcgtcggtccgtcaggtgcggggaaatcaacgctttgcagtctgcttccgcgtttttatgaagcatcggagggcgacattacgattgacggcatcagtataaaagacatgacgctttcttcgttgcgcgggcagattggcgttgtgcagcaggacgttttcttattctcgggcacgcttagagaaaatatcgcctacggccgactaggcgcatcagaagaagacatttggcaagctgtgaagcaggcgcatctggaagagctcgtccataacatgcccgatgggttggatactatgattggcgaacgtggcgtgaagctttccggcgggcaaaaacagcgtctgtcaattgcaaggatgttcttgaaaaatccgtcgatcttgattctcgacgaagccacctcagcccttgatacagagacggaagcggcgatccaaaaggcgcttcaagagttgtctgaggggcgcacgacgcttgtcatcgcccacaggctggcgacgatcaaagacgcggacagaattgtagttgtcacaaacaacggtattgaagaacaaggccgtcatcaagacctgatcgaagccggaggcctatacagcaggctgcatcaagcgcaattcgggcaaattgtgcagcgataggaggagaacatggaaagaaaaactgtgctgtacattgctgtttcattggatgggatgatcgcaaaagaagatggaagcatcgattggctggatgaatttgaaggtgaaggtgacaacggctacagtgatttttatcagactgttgatacagtcattctagggcggggcacatatgagcacgttaaagtgctaacaccggttttcccatatcaggataaaacctgctatgtttttacaggatcgcccgacagttatcaagatgaacatgtgacgtttatcaatgagggagccagagccttcactgcccgtttgaaacaggaaaaaggctcaaacatctggatagctggcggggcagagcttgtgaatgactttatgaaagaagatgccatcgacgaattcatcatcactgttattcccgtcgttttaggaagcggcatcccgctgtttcacgaactaacaaatgaaacaaaactgcggttaaaagggacaaaacaatttggacaagcggttcagctccattatgtaagagcataagaaaaaggatagacagatgtctatccttttttgtatgtaagttagagcgcttctctctcagcaggctcgatgagattttggaatttttcaatgagctgtgatgcttttgttccttcaactacgatcaaatattccttttcattatgagccatgcggaatgtttcaagctcaattaagcttttgattttgcacatcgttttctttgaataaatataaacctcgtggcttccggaatggcacattttataaagatgaatcaaatttcttaaagtaaaggcctgtgcggctactttcagagacttgatatttttaatgatctttctcctccatcgattgttgtcttatatagcctaagttcccaaagctgacaagtcgtaaacctatttttgcacatttatgatttccattgcagcgcaccgcccccgaggcgtttgacaccgcggatggagcttaattcatccatcaagcggagaagcgccttgtctttctgctttgcttcaatcatgaaatcaatattcgttccccattgcctaaagcgttccaacagcggcagcaaaaagttggcgtcaacataatcggcatggctgcgtatcgcttgttccgattttggggaagacaagtgaacctttggctgaaggccgatccgctcccacgttttgatcatgcggggcagtgctacattcaggtcggcgtgatcgtctggattggcgtaaaaatgatgaaagtcaaagacaaacggaacatcctcctgctcacagacctgaagcgtttcttccgttgtatatgttttatcatcattttcaagtgtcatccgctctttgatctcctgcggcagctgttttatattttgatgaaattgtgcagtggcggtgtctttatttccgtaagcgccgccaatatgaatgttgataacggagcgatcagcaatgcccatggcttcaagcatgcggtagtgatacgccatatcggttaccgcattttttgtgacggattccttcgggctcgtaaacagagtgaattgatttggatgaaagcttgttcgcagttgatgggttttaacaagctctccaatctcccgaaactctttttgaaacggtgttacaaaatcccacatcacgtcgggatgcgtagccagcggcacaatcgaactggaaaaacggtacaaagggatgccgtgtccgatgatatagtgaagggttctcatcgtattgtgcaaattggcttttgtcacagtcagaagcgcttcttttctttcagtctttgaaagctttgaataacgcgcgaatgtcaatgttttagcgggagacgcatcccaaaggctcatcgcatttgaaacgaacccgaatctgaaaatcataggaactctcctttataagaaataagataatgccctgccgagccattccgccgggcgctgcctgaatgtgcgcttgctgaaatcctccatcgtcagccgctccgactttttcatatcctcctcaatcgtggcatagacttcacttgtaaacgcttcgtcatcaatttcgacattcacctcttcatttaaaaacaggcttcgtttatcgaagttggctgttccgataatgctgagatggtcgtctatgatgagggcttttacatgataaaacccttgataataacgataaataagacagccggcatccaagagctccgaataatacgtaaaagctgcttctcgtaccagcggatggtctgatttcatcggtacaatgattctcacggatacgccgttttttcttgcgttaataagggcctcttgaagcggttttgatggaatgtaataaggcgtgcaaaccgtaaggcgattcttcgcttgggcaatgttggccaagtatatgttttcaagggaataaccgtcagtcgcatatatcttgtgagaaatagtcccttgctgaagctttggccaaacatccgaacccagttcgattccggtattacgttttagatcagaagcaaaaagcgtttgaagatcatgtacgccttctcccatcatgcgcagatgataatcctcccaattgccgaacttcgccttctttccaagatattcttcggcgatattaaacccgccgatataaccaatttttccgtctatcaccgtaatcttccggtgattccgtttttgcatgtgaaaaaagaaaaaaggaaaacggggacgattcatcacatggacatggacgccggcatttttcatcgtctgcagcgccgtttttttaattgcccggcagccagcccaatccagaagcaaataaacggagacgccagcttgggcttttgttttcagcaaggtatacatattgtggctgacctcatcatttttcataataaaaaacatcatgtgaacagaagaggcggcctggcgaatatcattcatcatccgctcaacgagatcagcgccgcagtggatcaattcgatgtcactcttcttttttgaaaaaacaggctcgtacgccttttttctgtatccggtacggcccatgaagatatcaagcagaatcaaggcaaagaaaataacgacaatgatcataatcacgataaataccttcataccggcactcctttccgtagtaaaggtagtgtgcccgaacagcaggaatttaattattgactgaacactcattcattatttatcataaaggtaatcttatacagattcgggggtaggggatcgcggtctttatcagtaaaaagggggaattagaatgagcggctttctcatcgcaaatgcattattatttctgattgtaaccgcttacgctgtctatttgtttgtgtacttggtcaaaacgagactggcctacatcaagctcggccagaaagaacaatttgatcaacggttcaaggaacggcttcacgccatatgggtgaatgtattcggacagaaaaaactgctcaaggacaagaaaagcggaatcattcacgtcatgtttttctacggatttatattggttcagttcggagcaattgactttatcatcaaaggactggctcccggccggaatctgccgcttggcccggtctatcccgccttcaccttttttcaggaaattgttacgtttctcattttaattgctgttgggtgggcattctacagacgttatatcgaaaagctcgtgaggctgaaacgcggtttcaaagccggactcgttctcatttttatcggaggattaatgctgaccgttctgcttgggaacgggatgaatctgatttggcatgagcatgggctttcttggagcgagccaattgcctcaggtattgcgtttatgcttagcggtgtcgggaaaataggcgcggcggtgattttctatatcgcttggtggatccatcttctgttcttgcttagctttttagtgtacgtgcctcagtcgaagcatgcccatttaatcgccggcccggcaaacgtctttttcaatcgaatggaatctgccggaaaacttgaaaaaattgattttaccgacgaaacgaaagaaagctacggagcgggaaaaattgaggatttcagacagtctcagctgcttgatctatatgcgtgtgtcgagtgcggccgctgtaccaatatgtgtcctgcaacaggcaccggaaaaatgctttctccgatggacttgattttgcgtctcagagaccatctcacggaaaaaggcgctgccgtcacctcgcgctccccatgggtgcccgcagcagcgtttcggcatacgagaggcaatcagctggctgcggcgtcagcgggcagcggatcgcaggaagccgcagcggcgcttgattacaatccaagcttgatcggcgacgtcatcacagaggaagaaatttgggcatgcaccacttgccggaactgtgaggatcaatgcccggtcatgaatgagcacgtggataaaatcatcgatctccgccgctacctcgtactgacagaaggaaaaatggacagtgacgcccagcgcgcaatgacaagtattgagcggcaggggaatccgtggggactcaaccgcaaggaacgtgaaaattggcgtgacgaggcgccggatgctgagattccgactgtaaaagaaatgaaaaaagaaggcaaagaatttgagtaccttttctgggtaggttccatggggtcttacgacaatagaagccagaaaatcgcaatttcctttgctaagctgctcaatcacgcgggcgtgaccttcgcgatcctcggcaataaagaaaaaaattcaggagacacgccgcgccgcctcggaaatgaatttttgttccaagagctggctgagaagaatatttctgaatttgaaaaaaatgatgtcaaaaaaatcgttacgatcgatccccatgcatacaatttatttaaaaacgaatatccggatttcggatttgaaggcgaggtttatcatcatacagaagtgctggccgagcttgtgaaaaacggaaaattaaagccgcagcacccgcttcatgagacgattaccttccatgattcgtgctatttgggccggtacaatgaagtctatgatccgccgagagagattttgaaagccattccgggcgtgcagcttgttgaaatggagagaaaccgggaaaccggcatgtgctgcggagccggcgggggattaatgtggatggaggaagaaacaggcaacaggattaacgtcgccaggacagagcaagcgctcgcagtcaacccatcggtgatcagttccggctgtccgtactgtctcacaatgcttggggacggcacaaaggcgaaggaagccgaagaccaagtcaaaacgtacgacgtcgtcgagcttctggctcaatccgttttaggcgctgatctgaaaatgggggagaagcaatgaatttttcattatcagaagaacatgagatgatacgaaaattggtgcgcgattttgcgaagcatgaggtggccccgacagcggcagaacgggacgaacaagaacgcttcgatcgcgagctgtttcgggaaatggcaaatctggggctgacgggaattccatggcctgaagattacggcggaatcggaagtgactatttggcctacgtcatcgcggtggaggagctgtcaaaagtgtgcgcatccaccggtgtgacgctttccgcccatatctctctttgcagctggccgctgtttgcctttgggacggaggagcagaagacagagtacttaacacagctggccctcggagagaaaatcggcgcattcgcattgaccgaagcagggtctggatctgacgccggcagcatgaaaacaactgctgaacgaatcggcgatgactatgtgttaaatggttccaaagtgtttatcacaaacggcggcgttgctgatatttacattgtttttgctgtcaccgatcccgagaaaaagaaaaaaggcattaccgcttttatagtagaaaaggattttgaaggattttttacaggcaagaaagaaaagaagctaggcatccgttcttcaccgacaacggaaatcatgttcgaagattgtgtagtgccagtatcaaagcgtctcggagaagaaggagaaggcttcaaaatcgcgatgaagacgcttgacggaggcagaaacggcatagctgcacaagccctaggcatcgcccaaggagcgcttgatgcggcgcttcaatatgcaaaagagcgaaagcaattcggaaaatcgatcggcgagcagcagggcattgcttttaaactcgcggatatggcgacaatgatagaagcttcaaggctattgacctatcaggctgcgtggttagaatcatcgggcctcccatatggaaaagcttccgccatgtccaaactgatggctggggatacggcgatgaaggtaacgaccgaagccgtgcagattttcggcggctacggctatacaaaagattatccggtagaacgctatatgcgtgatgcaaaaatcacgcaaatctatgaaggcactcaagaaattcaaagactggtcatctccagaatgctcgcggactaacggaaaacatctctcagtcggatcactcttgtaaaattatttaaattaacgctgttaagggtagcatattctgttttattttgtttataatgagaggtatggtttgtataagaacgatacaaaatcgctttcattattgataaaacagatacatataagtaatagaaagggagtgtccgaccttgggtatcaaacaatattcacaggaagagctaaaggaaatggctttagttgaaatcgctcacgaattatttgaagaacataaaaaaccagttccttttcaggagcttttaaatgaaatcgcatctttgctcggcgtgaaaaaagaagagcttggagaccgcatcgctcaattttatacagatttaaacattgacggccgcttcctggcgctttctgaccagacgtgggggcttcgcagctggtatccgtatgatcagcttgatgaagaaactcagccgacagtcaaggcgaaaaagaaaaaagcgaagaaagcagtcgaagaagatcttgatcttgacgagtttgaagagatcgacgaagacgaccttgatttggatgaagttgaggaagaaatcgatcttgaagccgacgattttgacgatgaagatcttgatgaagacgatgatgatcttgagatcgaagaagatattattgatgaagatgatgaagactatgatgatgaagaagaggaaattaaatagtatcagatttcatcttcaaaacgatcttgactttcatagtcgaactaggtagtatgtattttgggctcttcaaaaacgaagagagaacatagtacgttatgctccctttcaagaaattgaaagggagctttcttattttcacccctcatttttcttataaatcatttaaaaggctaaatgattttttataaaatagtacattttaaaaatgtagctaagagcgaagagaggagcaaacgaaatgacgaaatatatttttgtaaccgggggagttgtatcctcacttggaaagggtattgtagcagcttcattaggacgtttgctgaaaaaccgcgggctgaacgtgacgattcaaaaattcgatccatacatcaacgttgacccgggaacaatgagcccgtaccagcacggtgaagtattcgtaacggatgacggcgctgaaacagacttggaccttggtcactatgagcgttttatcgacattaatctgaataaattcagcaacgtgacaacaggtaaaatctattcaacagttcttaaaaaagaacgccgcggagattaccttggcggaaccgtacaggtcattccgcacatcacaaacgaattgaaagaccgtgtttaccgcgcagggaaagagacaaacgcagatgttgttattacagaaatcggcggtactgtcggagacatcgaatcactgccattccttgaagcgatccgccaaatgaagagcgacatcggccgtgaaaacgtaatgtacatccactgtacgctcgtaccttacattaaagctgctggcgaattaaaaacaaaaccgacacagcacagcgtaaaagaattgcgcagcttgggcattcagccaaacatcatcgtcgttcgtacagaaatgccgatttctcaagatatgaaagataaaatcgcgcttttctgcgacatcgatacaaaagcggttattgaatgtgaagatgcggacaacctttactccattccactggagcttcaaaaacaagggcttgataagcttgtttgcgagcacatgaaattggcatgcaaagaagcggaaatgtccgagtggaaagagcttgttaacaaagtcagcaacctgtctcaaacgattacaatcggccttgtcggcaaatacgttgagcttcctgacgcatacatttctgttgtcgagtctctccgccatgcgggctatgcgtttgacacagacgtaaaagtgaaatggatcaacgcggaagaagtgacagaaaacaatatcgcagaactcacaagcggaacagacggcatcattgtgccgggcggattcggagaccgcggtgttgaaggcaaaatcgtcgcaacaaaatacgcgcgcgaaaacaacattccgttcttgggcatttgcttgggcatgcaggtggcgtctattgaatacgcacgaaacgtattgggcttaaaaggcgctcactcagcggaaattgatccgtcaactcaatacccgatcattgatcttcttcctgaacagaaggatgttgaggatctcggaggaacgcttcgtctcggcctttacccttgtaagcttgaagaaggcacgaaagcctttgaagtgtatcaggatgaagtggtgtacgagcgccaccgccaccgctatgagtttaacaatgaattcagacagcaaatggaagagcaaggcttcgtattctcaggcacaagccctgatggacgccttgttgaaatcatcgagctgaaagaccacccttggttcgtggcttctcagttccacccagagttcaagtcaagaccgacaagacctcagcctctattcaaaggctttatcggagcgtctgtcgaagctgcaaatcagaagtaataaaaaagacttgccgtttgtcaaaagcgggcaagtcttttttatttgtttccggcaagttccagcatgtacaataagatattatgcatactcttgcagaatttcttttagtgtaaacgataaagcgtgatagacatacagtgctgtcattaaagagggaaacccgtaacgggtgccgtcttcatcgggaacaagcggcatttttaatttagaatcaatatgcacatcacaatactgttctattcccgcactgtctttggctgcgggcgatacgcatacgactcccgcacctttttcataaagctcttttgcgagcgcctgttcttcggctgtgcccgtccctgaacaaaacatcagcaccctgtcgctttctgtcacttcctcagcgctttctggaaaggctttgacagatgggaagggttctttgctttcggtggcctcaaaaaagacgccctgaagctcattcgctccgtataaataaatggaatgcccgctgatcaccgcttgagcaagcagccgcgccccatcttcaatcgcgtcagattccttatcctgaatgcgggaaaaaatacctgttaactgcgtcgtgaatattttcaacataagtgaatcctcctttataacgtacaatatcagtatacaacaaaagagaaaatgctcagaaaatgtcgtaaagtagactattataattaaaggaaataggaaaatcaaacagaatacatacaatactgcttacttttgacgaaaatcataatattggggtgtaaaatgatgaatgaaaaaattttaatcgttgatgatcaatacggcattcgtattttgctaaatgaagtgttcaataaagaaggctaccagacgtttcaggctgcgaacggcctgcaggcgcttgacattgtgacaaaagaacggcccgaccttgtgcttttggacatgaaaattcccggcatggacggaatcgaaatcttaaaacggatgaaggtcattgacgaaaacatccgggtcattatcatgacggcatacggagagctcgacatgatccaagaatcgaaggaattgggcgccctgacgcactttgccaagccgtttgacatcgacgaaatcagagacgccgtcaaaaaatatctgcccctgaagtctaactgacaaaaagaagaaacaaatgaatcatgtcattatgttgccgatttgtcgaaaagttggtatcctagttatggagaaaaagcgatctgagtatttacatatgacagcaatatatgggtcatgctagggtggaaagcttttttcgctagaagacaatcaggctacataaggaggacattcgacatgcctttagtttctatgacggaaatgttgaatacagctaaagaaaaagggtacgctgtaggacaatttaacttaaacaaccttgagtttactcaagcgattttacaagcagctgaagaagaaaaatctccagtgatccttggtgtttccgaaggtgcgggacgctacatgggcggcttcaaaacagtcgttgctatggtaaaagcacttatggaagagtacaaagtgacagttcctgttgcgattcacttagaccacggttcaagctttgaatcttgtgcgaaagcgattcatgcaggtttcacatctgtaatgatcgacgcttctcaccatccatttgaagaaaacgtagcaacaactgctaaagttgttgagcttgctcatttccacggagtatctgtagaagctgagcttggaacagtaggcggacaagaagatgacgttatcgctgaaggcgtaatttacgctgatcctaaagagtgccaagagcttgttgagcgcactggcatcgactgccttgcacctgcattaggttctgttcacggcccttacaaaggtgagccaaaccttggcttcaaagaaatggaagagatcggaaaatcaactggtcttccattagttcttcacggcggtactggaattccgactgctgacatcaaaaaatcaatttcacttggtacagctaaaatcaacgtgaatactgaaaaccaaatttcttctgcaaaagctgttcgcgaaacattggcagctaagcctgacgagtacgatccacgtaaataccttggaccagctcgtgaagcgatcaaagaaacagttatcggtaaaatgcgtgaatttggttcttcaaaccaagcttaattcaattggaactttttatagccgcctgacagcttgacaggcggttttccgtctatctttagaaagcgcaatcatattcgcagttcagaaaatttcttaatcagggaggctttttgaaaatgttattctttgttgatacagccaatatcgatgaaattagagaagcgaatgaattaggaattctcgccggtgtaacgacgaatcctagtttagtagcaaaggaagctaacgtatcattccacgaccgtcttcgcgagatcacagacgtcgtgaaagggtctgtaagcgcagaggttatttctttgaaagctgaggaaatgatcgaggaaggaaaagaactggcgaaaatcgcaccgaacattacggtgaaaatcccaatgacgtctgacggtttaaaagcggtaagagcacttactgacttaggcatcaaaacaaacgttacattgatcttcaatgccaaccaggcgcttcttgctgccagagcgggggcaacatatgtatctccattcctgggacgtttagatgacatcggccacaacgggcttgacctgatttcagaagttaaacagatttttgacattcacggccttgacacgcaaatcattgcagcgtcaatccgccacccgcagcacgtgacagaagctgctcttagaggggctcatatcggcacaatgccgctgaaagtcattcatgcgctcactaaacacccgttaacagacaaaggaatcgaacaattcctggcagactggaacaaataatgaaaggggcggcaaacagctttatgcctgtttgccgcggcctttgtatttcaccgacctgatacagcggatcttcagatgctgacgccgctttacagagaaggaatcattgggctgcagaagctgatatcggaatgaagggtatgcgtactgcttttgccggatgacgacgatgtctctcgagccggcgggtctctgtgcatcttttgaaacctgtaccccccaaagcttcgctattttcttcctgatattttacaatgtgttgtattctttctcttcgaattggctagattttggacatgagctttatttgcagagacagaataaaatgacattttatttagctccgcagctatcttcttatggaaggagactatcatggaaaagttgaatattgccggcggtgactcgttaaacggtacagtacatatcagcggcgctaaaaacagcgctgttgcgttaatacctgcaaccattttggcaaattccgaggtgacaattgaagggcttccagagatttcagatattgaaacgctgcgtgacctgttaaaggaaatcggcggcaacgtgcattttgagaatggggaaatggttgttgaccctacgtcgatgatcagcatgccgcttcctaacgggaaagtaaaaaagcttcgcgcgtcatattatttaatgggggcgatgctcggccgcttcaagcaggcggtcattggattgcctggcggctgtcacttagggccccgtccgattgatcagcatatcaaaggctttgaagcactcggagctgaagtaaccaatgaacaaggcgccatttatttgcgagctgaaaggctgagaggcgcacggatttatttagatgtcgtaagcgttggggcaacgattaacattatgctcgccgctgttttggcagaagggaaaacgatcatcgaaaacgctgccaaggagcctgagatcattgacgtcgcgacattgcttaccagcatgggcgccaaaatcaaaggtgcgggcaccaatgtgattcgaatcgacggcgtgaaggaactgcacggctgcaagcatacgatcattccggacagaattgaggccgggacatttatgattgcaggggctgcaatgggcaaggaagtcattatcgataacgtcattcccactcatctagagtcgttaacggcaaagttgagagaaatgggctatcatatcgaaacaagcgacgaccagctcctcattgtcggcgggcagaagaacttaaagccggttgacgtcaaaaccctcgtatacccagggtttccgactgatttacagcagccgatgacggcgctcctgacaagggcgaaagggacgagtgtcgtcacagacaccatctactcggcaagattcaagcacattgatgagctgagacgaatgggtgctaatatgaaagtagaaggcagatctgccatcatcacaggtcctgtcgagcttcaaggcgcaaaagtgaaggcgagtgatctgcgtgccggagcctgcttggtggtagccggactgatggctgatggcgtcacggaaattacgggactggagcatattgaccgcggatacagcagccttgagaagaagcttgaggggcttggagcgacaatttggcgtgaaagaatgactgacgaagaaatagaacagcttcaaaattcataatggtttcttgtgagaggagatcgtgttgaaatggaaagaagtttatcaatggaattggtacgtgtaaccgaggctgcggcattggcatcagcaagatggatgggccggggaaaaaaagatgaggctgatgaagcggcaacaagtgcaatgagagacgtttttgatacagtgccgatgaaagggaccgttgtaatcggtgaaggggaaatggacgaagcgccgatgctgtatatcggggaaaaactcggaaacgggtacggccctcgcgttgatgtcgcagttgaccctcttgaaggcacaaacatcttagcaagcggcggctggaacgcgctgacggttatcgcggtcgcagaccatggcacgcttctgaatgctcctgacatgtatatgcaaaaaatcgcagtcggtccggaagcggtgggctgcattgacatcgaagcacctgtcattgacaaccttaaagcggtggcaaaagcgaaaaacaaggacgttgaggacgtcgttgccacaattttaaaccgtgaaagacacgaaaaaatcatttccgagcttcgtgaggccggcgccagaatcaaattgatcaatgacggcgatgtcgcaggcgccatcaacacggctttcgaccacacgggcgttgatatcctgttcggatcaggcggcgctcctgagggtgtgctttccgctgttgcgctaaaagcactcggcggagaaatcattggtaaacttcttccgcaaagcgaagaagaaatcactcgctgtcacaaaatgggccttgatttaagcaaagtccttcgcatggaagaccttgtgaagggtgatgacgcgatttttgcagctacaggggttactgacggcgagctgttaaaaggagttcaattcaaaggctctgtcggtacaactgaaagcttagttatccgtgcaaaatcaggcactgttcgtttcgttgacggcagacacagcttgaaaaagaaaccaaatcttgtaatccgtccataacaaacagaaaaagcgggtgtgagcccgctttaacttttgcagaaaagcgtcaactctatcaattccgtgtcaaaaccttatttcagttgaataattttttgaaataaggtaaaaataaagagtgctgcgaattttactgcgtaataccttcttttaagcactaggaaagtttcaatttctaccgcatacagacgatataagtattgatcttctcatgtttttgtcctcgcttccttcaaaactcattaagacaatccttttaacaaaagcgccgatcatgggtggaagtgttaccgatagaagttcctttatgttaaaaaaagaatgtgctttggcggatgttgtgcaaaagcagcagatgacatgttcagagtaagatattgactatgaaaagcgtggtgtttttatgaaagacgtatctatttcctctttggaaaatatgaaattgaaagagctttatgaacttgcaagacattataaaatctcctattacagcaaactgacaaaaaaagaactcattttcgccattctgaaagcgaatgcagaacaggaagatctgctgtttatggaaggcgttcttgagatcatccagtctgaaggtttcggcttcctgagaccgatcaactactctccaagctcagaagacatttacatctcagcttcacaaatccgccgtttcgatttgcggaacggagacaaagtatctggcaaggttcgcccgccaaaagaaaatgagcgttactatggacttttgcacgttgaagcagtaaatggggatgatcccgaatctgcaaaagagcgtgtgcatttcccggctcttacgccactttatccggatcgtcaaatggtgcttgaaacaaagccgaacttcttgtctacaagaattatggacatgatggcgccggttggatttgggcagcgcggattgattgttgcgccgccgaaagccggaaaaacgatgctgctgaaggaaattgccaacagcattacagcgaaccagcctgaagcagagctgatcgtgcttttaattgacgaaagacctgaggaagtaaccgatatcgagcgctctgtagctggggatgtcgtcagctcaacgtttgatgaagtgccggaaaaccatatcaaagtggccgagcttgtgcttgaacgtgcgatgcgtctcgtggaacacaaaaaagacgtcattatcctgatggacagcatcacacggcttgcccgcgcctacaacttagtgattccgccaagtggaagaacgctttccggggggattgacccagcggcgttccaccgtccgaaacgcttcttcggggctgcgagaaatatcgaagagggcggcagcttaaccatccttgctacggctctggttgatactggttcacgtatggatgatgtcatttatgaagaattcaagggaacaggcaacatggagctccatcttgaccgctctcttgccgagcgccgcatcttccctgccatcgatatccgccgttcaggaacgcgcaaagaagagctgcttgtgcctaaagagcatcttgatcgtttatggtctatccgcaaaacgatgtctgattcacctgatttcgcagaaaagttcatgagaaaaatgaaaaaaaccaaaacaaaccaggaatttttcgatattctcaatcaagaatggaaacaggcaaatctatcatctgcaagaaggtaaattgtatttgcaaaagaagtaaatcactgatataattttctcatatgcgtttcggacaatgctccgaaataataactctgtttccacacgggattcagggcggaaggagatggatacaatgaaagcaggaattcatcctaatttcaaaaaagcaacagttaaatgcgcttgcggaaatgaatttgaaacaggctcagtaaaagaagaggtacgcgttgagatttgctctgaatgccacccattctacactggccgtcaaaaattcgcttctgctgatggtcgtgttgatcgctttaacaaaaaatacggtcttaagtaataatagatttctcaacaggcaagcagcagtcttgcctgttttttatattgtctaaaacacagctggcagagagaggggagcgaagcctatgtacataatgaaacaaagcgggtggcttgagctgatttgcggcagcatgttctcggggaaatctgaagagctgatcagaagagtgaagagagcaacttatgccaagcaggaagtcagggtatttaagcctgtaattgataaccgatacagcgaagctgctgttgtctcccataatggaacatcgatgacgagctatgccatttcgtctgcttcggacatttgggatcacatcagtgaaagtacagatgtgattgcggttgatgaagtgcagttttttgatcaggaaattgttgaggttttatcatctcttgccgataaaggctaccgtgtgatagcagcaggccttgatatggattttaggggagagccgttcggtgtcgtcccgaatatcatggcgattgcggaaagtgtgacaaagctgcaagccgtctgttctgtttgcggatcaccggcgagcagaacacagcgcctcattgacggcaaacctgcttcttacgatgatccggtcattttggttggtgcatctgaatcatatgaagcaagatgcagacatcatcacgaagtcccaggtaaatctaaaaaatagtccaaaacatgggtataaagatagaatgcaccggctaaaaacaccggtgttttttttatattctgataatattcaattaaaaaatttaaataagtatattaaaaaattaagtaattttcttcccttgaattttgattttgacaggcatacaatagcttacgtaatgtaaatagttttgagacattgttcgaataattgtcacaaagtcgcataaagatcatgatcggtcatattttagatgggttattacttaacttggttaactatttcaagaaagaaggagatttgcttgaataacataaaaaaaacgaaagaaggccacttagaaacaactcttagaggaaaagaagttttatctattcctactttaaataaaggcgttgctttttcactagaagaaagacaagaactcggcttagaagggcttctgccgccaactgtactttctcttgatcaacaagcacaacgcgcgtacgagcaattccaagcgcagcctgaccgccttcgtcaaaatgtttacttaagtgatcttgcaaaccgtaacgaagttcttttctataaattgctgaaaaaccatcttcgcgaaatgcttcctgttgtgtacacgccaacagttggtgaagcgattcaggaatacagccatgaatatagaagacctcaaggaatctacttgtcaatcgacaacattgacggtattgaaaaagcgtttgaaaaccttcatgcgacagcaggcgatattgatcttatcgttgctactgactccgaaagcattctcggtatcggtgactggggtgtaggcggtattaatatcgcaatcggtaaattggctgtttatactgctgcagctggtattgaccctagccgtgttatcccggttgtgcttgatgtcggtacgaacaacgaaaaacttctaaacgatcctttatatattggtaacaagcatgaacgtgttcaaggtgaacgctacgaagctttcattgacgcttatgtaaaagctgcattgaaattcttccctaaagcgcttcttcactgggaagaccttggcaacaaaaatgcacgcaacatcatgaaaaaatacaatcatgaaatcctgacatttaatgatgatattcaaggtactggcgcgattacacttgcaggtgtgcttgccgctatgaagaaaaccggcgcttctattaaagatcagcgtgttgttatcttcggtgctggttctgctggtatcggtattgctgaccaaatccgtgacacaatggtgctagccggattatctgaagaagaagctaacaaacgtttctacacacttgattacagaggcttgctgactgaagacatcgaaggcatccttgatttccaaaaaccttaccttcgcaatgcggatgaagtgaaagactggaagcgcgatgaaaaaggtcaaattccattcgatgaagtggttcgtcaagcgaaaccaacaatcttgattggtacttcaggggtttcaggtgcattcacagaggaaattgtaaaagaaatggcatctcacgtagaccgtccggttatcatgccgatgtctaacccgactcaccttgctgaagctgtccctgaagatctgttcaaatggactgacggaaaagtgcttattgcaacaggaagcccatttgacaatgtagaatacaacggtgtttcttatgaaatcggacaatctaacaacgcattcgcgttccctggtcttggacttggttcaattgtagctgaagcgcgtatcattacacctgctatgtttgctgcaactgctgatgcgattgctgaaatggttgatcttgaaacacctggagcaggattgcttccaagcattgataagcttcaagaggtttctatccaagttgcgattgccgttgctgaagcagcaattaaagacggcgtggcaaatcgtcagcctgaagatgtgaaacaagcggtacttgatgcaatgtggacacctgaatacaaaaaagtcatcgcgaaataattagcgagtaaatttttctgtccgagggaaagctttttgtaaagctaaagtatacggacataggatttggaggagaatattttgagcatcttagatatcttaatcctcctggcgccgatcttctttgttatcgtgctgggttggtttgcaggacattttggaagttatgatgccaagtcggcaaaaggggtaagtacgttagtaacgaaatacgcacttccagctcactttatcgctggtattttgacaacttccagaagtgaatttttatcacaagtacctttaatgatttctttaattattgggattgttggtttctatatcatcattcttttggtttgcagatttatattcaagtatgatttaacgaactcatctgtattttctttgaactctgcacagccgacattcgcatttatgggtatcccggtattgggaagcttattcggagcgaatgaagttgcgattccgatcgcggtcacaggtatcgtagttaacgcgattcttgatccgctcgcgatcattatcgctactgttggtgagtcttctaagaaaaacgaagagagtggcgacagcttctggaagatgacaggaaaatcaatcctgcatggtctttgtgagccgcttgcagctgctccgttaatcagtatgatcttggtgctggttttcaatttcactcttcctgagctgggtgttaaaatgcttgatcagcttggaagcacaacatctggtgttgctctcttcgctgttggtgttaccgttggtattcgtaaaattaaactcagtatgccggctatcggtattgcgttactaaaagttgcggttcagcctgcgttaatgttcctgattgctcttgctatcggacttccggctgaccaaacaacaaaagcaatccttcttgttgcattccctggttctgccgttgcagccatgattgcgactcgtttcgagaaacaagaagaagaaactgcaactgcgtttgtggtcagtgcgattctgtcattgatttcacttccaatcattatcgcgcttactgcgtaacaaaaaaagctccctttaagggagctttttgctttaggtttgaaatttgaacagtgacagcagcggtttttttcttgttttggttttttcagaagcagcagcagtctcggggatcgaatgagcggtgaattctttcatttgtgaggtcagtgattgcagatctgcaagaatatcatcgatttctctgcggtgctgaagcagctggtaagatacaccttcatcggctttttgtttcagctggcgttccagttccgacatccttgccatcaattcgctttcgtcctgcctttgctgtaaaagggtgtccagcttttgttcaagctgctcgattcttcgttctgtgtcgctacttgttttttggacaaggaagcctgtgcgctttttagcgcttttcggcagatgaatatcctgaatcgccgtgccttcagagatttgtttttgaacggattttagaaccttcacgtcttctgccgtgaacgaatagtgtccgagctcattgcgttcggccggaagattcagctgcttcacccaccgctgcaccgtctttgcggagacgccgagttcacttgctaccatatttgtattcatgatcccatacctccttttaagctaggtattcgaccatagaatgcggttcccttcccgttagacaaaacaagaaaagattcggcaaagaaagtgggtatctcctttttttcttcaaaaactgttattgttcatacagttctaatggaagctggtcaggatcaaaaaagaaggtgaaacgcttgccggtcagcggatctgttctgattggctctgtttcgattcctttttcatgaagctcttgaacagctttatccaagctgccgactgtaaaggcgaggtggcgcaggcctgcggcttcaggccgggtttgtcgttcgggcggatcgggaaacgagaacagctcaatgacatacgagccgttaagcgacaaatcaagcttataggagccgcgctcttcgcggtacgtttcttgaatcacctgaaaaccaagcttatgtacgtagaaagctttcgacttttcgtaatctgaacatatgattgcaatatgatgtatggatttcagcaacatcatccctcctcgaattccagtatagcagagggagcttttccagctgggattgaaatgcttttgactggggttaatcactatactataatgagaatgttacgcacaggaaaacagaggtgaagaccgtgttagaccgtttaaaatcaattgaagaacgatacgagaaattaaatgagcttttgagcgatccagaagtagtcaacgatccgaaaaagctaagagaatattcaaaagagcaatctgatatacaagaaacagttgacgtatatagacaatacagagatgcgtcagaacagctggctgatgcaaaagcgatgcttgaagagaagctggatgctgagatgcgcgacatggtgaaggaagagatttctgaacttcagaaggaaacggaaacactgtcagaacggctgaaggtgctcctgatcccgaaagatcctaatgacgacaaaaacgttatcatggagatccgcggggctgcgggaggcgaggaagccgctttattcgcgggcaatctgtacagaatgtattcccgttatgctgagcttcagggctggaaaacagaggtcatggaagcgaatgtaaccggaacgggcggctacaaagagatcatctttatgattacaggaagcggcgcgtattctaaactcaaatatgaaaacggcgcccaccgcgtacagcgtgttccggaaacagaatcaggcggacgcatccatacatccactgcaacagtggcatgtcttcctgaggcagaagaggtagaggtcgacatccatgagaaggatatccgtgtcgatacatttgcttcaagcggaccgggcggacaaagcgttaacacaacaatgtctgcggttcgtctgactcacttgccgacaggtgttgttgtatcatgccaggatgaaaaatctcaaattaagaacaaagaaaaagcaatgaaggttctccgtgccagaatctatgataaatttcagcaggaagcccaggctgaatatgatcaaacacggaaatcagcagtcggatctggtgaccgctctgaacgtatccgcacatacaacttcccgcaaaaccgtgtgacggatcacagaatcggtttgacgattcaaaagcttgatcagattcttgaaggaaaacttgacgaagtggttgaagcgctgattgttgaagatcaggcaagcaagcttcagcagtcggaaggttaagatgaagacgatattcgaagccctgaaatgggcttcttcttatttaaccgaagcgggaagagaagaaaatgcggccgagctcctattgctttatgataccggaatggagagaagcaagctgctcgcaagcttacaggaaccgattggtgaagacgaactgtatcgctttaagcgtcacgttgagatgcataaagagggcgtgccggttcaatacattataggaaaagagtttttttatggacgggaatttatggtgaatgatgatgtgctgatcccgcggccggaaactgaagaagttgtctttcatttgcttgaaaaatatcggagtgttttttctgaagacggcaagctcgaagttgttgacgttggtacagggagcggcgcaatagccgtcacgcttgcgcttgaaaaccaaagcttttctgtgtcggcggtcgatatttcgaaagaggcgctgcaagtcgcctctgccaatgcagaaaaactcggagcgaatgtgcgcttttatcagggcgatctgcttgagccttttattaaggcgggaaaaaaagcggatatcattgtctcaaacccgccatatatttcagaggaagaaatggctgatttatcggaaattgtccgttttcatgagccgctgcacgcactcaccgatggcggagacgggctgaaattttataagcggtttatggaagacattccgcttgttatgaaggataaagtatttgtcgtttttgaaatcggctggaaacagggagcggcggtcaaagacctgatcctcaaggcgtttaagggggcggaagtggaagtgctgaaagatattaatggaaaagacagaaccatatgcgctctgattcataaaaataaataagcagcttgctggcgagtgaatggatcaagctgtttaacaccagcaaaggggatgtaaacatgaaaaaggccctgacagcaggaatcctgctcattgcgattgagagcatgattggcaccatttttccgcaggctctttcatatgaagcgatttttggcgttgcgtctctcgttttagtggggctcgcgatcattacatcgggtttggctgtaagcggaagcgatcagcgggcaaactaccattcagaaaccaaagaaggccgtacatctcgcatgaaaatggcggccgctttctttgttgcggcgataccttccattctatgttatttactgacgattttgttttaataaaaaaggaagcctcttaggcttcctttttttgcagtaaaacagaatcccatatccaatagataagagctgttaatacagcgaaaagataaaaggctgtattttgaaacagagattgtcccgaaggctgaagcacgccgaaaatgatcgcgttggcaataaaagcagcggcaaggtaatacagcagatacaaagggctgaaacgtttcggctttttattcatcatgatttgaagcggcagtgcgaagatcaaataaggaaacagaaaataaaatgccattgtgatgagagcggcaatgataaatgaatgaatataaattactgaataaagaacggacatcgtgaatgctgataacagcactgtataattgtatttcatcttaaacctcctaaaacactatcgtaccataaataagattaacagcttgctagatttttttcaccctgcacgtttatcccaggctctccttgtccataatagggctagaaacaaagcacggagaggaacggtggggaccgatgaaaaaaacagtaatcatttgtatatatatctttcttttattatccggagcgctcgtagggctggcaaaagaagagacggcacaaaaatcggaaaatcagccggtggtcatacctgatcaggcgattcgtttgagaatactggcaaacagcgatagtgatcaagaccagcaattaaaacgtcatataagagacgcggtgaataaagaaatcacaacttgggtaaaggatattacttctattgaagaagcgcgtcgcgtgattcgttcaaagctgcctgaaatcaaagcaattgcaaaggaaacaatggagaaagaaggagcgaatcagtcgatatccgttgattttgacaaaatctcgtttccgacaaagctttacggcaacatggtatatcccgctggtgagtatgaagcgattttgattacgcttggaaacggagacggcgccaactggtggtgtgtgctgttcccgcccctctgctttcttgatttttctaacggggaagccgtcaaagaacaagaagataaagaagcctcaaaaaagcagactgaaaaagtgcttgaggacgtaaccgctaaagcggaaaaagccaaaaaagaagagaacgaagaaaaagaagacggcacagaagtgaaattctttttagtcgaatggatttccgaccttttttcctaatcatctggtctaaaaatagatttgcctcatagattggaagaaagaacgcaaaaacggggtgaacggatgttttatcaactgcgggtggcaagggaaaaagacggagatgtgctcgaggcatttttaaaacaggcaaaaaccagctatgaaggcgtgaaagaaggcttcactcaatttcttatgctggaggacagtgagaaaaacattgccggatgcctcggtattgaaaaaataagctgtgaccaggggctgctgcgatcacttgtcatatcggacaagcttcaccaaggccacatcgtcacgctttttcaaagcatggaggtgctgtgcgaaaagcatcagatcaaaaccgtgtacctagtagcaaatcagcattcctctgcggactttctgacggccatgggttttgaaagagctgagagtgtaccggaggagctgttttcttctgatcacttctgtgaatcgcggcaaacagaaggagccgttttgatgaaaaaagcgtctggataagtgcagtttatacacatacttatccacttctttattagcgttgtccacaatttgtggataacgcttgttttattacaggacatcttttatactttcaaaaggattacacgcgtaaaacaatcgttttattgttgtgaataaggagtttggtcagaaatgaaaacgaaaagatggtttgtggatgtaactgacgagttatccacaaatgatccacaaattgcacaagcagccgctttgctccgagaaaatgaggtcgttgcctttccgacagaaacagtatatggcctaggcgcaaacgcaaaaaatacggatgccgtcaaaaaaatatatgaggcgaaagggcggccgagcgataatcccctgattgtccacattgcggatatcagccagcttgaggatttaacgggcccggcgccggaaaaggcgaaaacattgatgaaacggttttggccgggagcacttacgctcattctgccttgcaaacctgatgcgctttcacctcgtgtaacggcaggtcttgaaacggttgccattagaatgccggatcatccgcttgcccttgcattgattcgcgaatcgggactgccgattgcagcaccgagcgccaatctatcaggcaagccaagtcccacaaaagcggagcatgtggctcacgacttggatggccgcatagccggtattgtggatggaggccctaccggaatcggggtcgaatcaactgtgctttcatgtgcggacgacatccctgttctcttgcgtcctggcggcattacgaaggaacaaattgaagcggtgatcgggccgatccatgtggataaagggctcagcgaccaaaacgagaagccgatttctccagggatgaaatatacacattatgcgccgacagcgcctcttgccatttgcgaaggcagcccagagcgcattcagcacctcattcaagaatatcaacagggtggaagacgggtcggtgtcctgacgacagaagaaaaagcgggcgtttattccgctgattatgtgaagagctgcggaagacgggctcagcttgagactgttgcggcagggctgtatgatgctttgcgcagctttgatgagaataaggtggatttcattatagcggaatcctttccggatacaggtgtcggtcttgctattatgaacaggctgatgaaagccgccggaggaagagtgattcgctgaaagcagtcagatgttctaaccctttttggacacgcataggctaaaaaagcggggcgtgtccaagggggttatttatgtatgtcggatttgtttataggcgaactgattacattaagcatcatggcgtttgctttagggatggatgctttttctgtcggccttggaatgggcatggtcaaacttagaaagaagcagatattctatattggtttcatcatcggcctctttcacgtcatcatgcctctcgcagggatggcggccggtaacatgctgtcagggctcctcggcgtgttagcggtttatatcggtggggcgctgctttttgttcttggggttcaaatgcttatggcctcttttaaacagtcagaagaacgattcatgtcaccggcagggccgggcttattgctgtttgccatcggcgtcagccttgacagcttttccgtcggcttgagcttggggatatacggctcgcatccgctcctcacaattaccctgttcgggctgttcagcatgatgttgacatggctgggcctgctggtcggaaaacaagtgcagtcatggcttggcacatacagcgaagcgctcgggggcatcatattaatcgtgtttggattaaagctgcttttgccaatttaatataccaataaaagaaacgaagtcgccgtttcttttttcttcatatataatagagaaaaataaggggtgactgacatggatattatttttgtctgtactggaaatacgtgccgcagcccaatggctgaggcgctttttaaatcaattgcagaaagggaagggctgaatgtcaatgtccgctcggcaggcgtgtttgcttcacctaatgggaaagcgacgcctcatgcagtcgaagcgctgtttgaaaaacacattgcccttaatcatgtgtcttctccattaactgaagaacttatggaatcggctgatttggttctggctatgacccatcagcacaaacagatcattgccagccaatttggacgttatcgtgataaagtgtttacgttaaaagaatatgtcacaggcagccatggtgatgtcctcgatccgttcggcggctcaattgacatctataaacaaacgcgagatgagcttgaagagcttcttcggcagctggcaaaacagctgaaaaaagaccgtagataagttgtcagaaaatctgcaaacaggtcatttgcaaatcctgcgtgaaggagtagaatatagtgaaaagcacatcatatggtgtgaatcaaagagcggacaggctgcgcggtcaataaagcgggcgggccgcatcacacacgctgggaggaaaagcagatgaaagtagccattgcatcggatcatggcggcgttcacattcgaaatgaaatcaaagagttaatggacgaattgcaaattgaatatattgatatgggctgtgactgcggcagcggctctgtcgattatccggattatgcttttccggtggccgaaaaagtggttagcggcgaagttgacagaggcattttaatttgcgggacaggcatcggcatgagcatttccgctaataaagtaaaagggattcgctgcgcgctggcgcacgataccttcagcgcgaaggcgacgagggagcataatgacacaaacatccttgcgatgggtgaacgggtgatcggacctggtttggctcgggaaatcgcaaaaatctggctgactactgagtttaccgggggaagacaccaaacgcgtattggaaaaatctccgattatgaagagaaaaacctgtaggggtgctgtttaatgaatgagttgaaacaaacgtggaagacgatgctgtctgagtttcaggaccaagcggaattgaaacaagatcagctcttcgtccttggatgcagcacgagcgaagtggccggcagccggatcggcacatcgggcagtgtagatatcgctgaaagcatctacagcggacttgctgagctccgggaaaaaacgggaatccatctggcgtttcaatgctgcgagcatttaaacagagcgcttgtcgtcgaagcagaaacagccaagctgttcaggcttccaaccgtttctgccgtgcccgttccaaaagcgggcggagcgatggcgtcttatgcgtttaagcagatgaagtctcctgttcttgttgaaaccattcaggctgacgccggaattgatataggcgatacgtttatcggcatgcatctgaaaccggtggctgtccctgtgcgtgtctctcaaaacagcctcggttcagctcatgtgacattggcgcgtacacggccgaaactaatcggcggagtgcgggcagtttatgagtgcgaatgaaaggactgcatagccagtcttttcttttattttaagatagtgaaataaattccgaactttaaattaaatttaagttattaatattcgtttttaccaataaaaatttagattttttaaaaataatcttttacatcggccttaaaaaccatgtacaatagtgatggtaaaaacaaagaacaggatacggataggagaggatctcgctgatgaaacatttacctgcgcaagacgaacaagtgtttaacgccattaaaaatgagcgtgaacgccaacagactaagatcgaattgattgcttctgagaactttgtaagtgaagcggttatggaagcacaaggatctgttttgacaaataagtacgcagaaggatatccgggcaaacgctactacggcggatgcgagcacgtcgatgtcgttgaagatatcgcccgtgaccgcgcgaaggaaatctttggagcggagcatgtaaacgttcagcctcattcaggcgcacaagcaaacatggcagtgtacttcacgattttggagcaaggcgatactgtacttgggatgaacctctcccacggcggccatttaacacacggaagcccagtcaacttcagcggtgttcaatataactttgttgagtacggcgtagataaagaaactcaatatattgattacgatgacgtgcgtgaaaaagccctcgctcataaaccgaagcttatcgtagcaggagcaagtgcgtatcctcgtacaatcgactttaagaaattccgtgaaattgctgatgaagtcggcgcttacttcatggtggatatggcacatatcgcaggacttgttgcggcaggccttcatccaaacccggttccttacgctgatttcgttacaacaacaacacataaaacacttcgcggtcctcgaggcggtatgatcctttgccgtgaagagtttggcaagaaaattgataaatcgatcttccctggaattcaaggcggcccgctgatgcacgttattgccgcaaaagctgtttcattcggtgaagtattgcaggacgatttcaaaacatatgcacaaaacgtcatttcaaatgcgaaacgtctggctgaagccttaacgaaagagggcatccagctcgtttcaggcggaacagacaaccaccttatccttgttgatcttcgttcgctcgggctgactggtaaggttgcggagcatgtacttgatgaaatcggtattacgtctaacaaaaacgcgattccatatgatcctgaaaaacctttcgtaacaagcggcatccgtcttggtacagctgctgtaaccagccgcggttttgacggagacgcattagaagaagtcggtgctatcattgcgcttgcattgaaaaaccacgaagatgaaggaaaacttgaagaagcaagacagcgtgtagctgctctgactgataaatttcctttatataaagaattagattattaagatcctaaaacccgcttgggcttatgcccggcgggttttttgacgatgttcttgaaactcaatgtctttttttgtagaatcaatagaagtgtgtaattgttgatgggacaataaaaaaggagctgaaacacagtatgggaaaggtttatgtatttgatcatcctttaattcagcacaagctgacatatatacggaatgaaaatacaggtacgaaggattttagagagctagtagatgaagtggctacactcatggcatttgaaattacccgcgatcttcctctggaagaagtggatatcaatacaccggttcaggctgcgaaatcgaaagtcatctcagggaaaaaactcggagtggttcctatcctcagagcaggattgggaatggttgacggcattttaaagctgattcctgcggcaaaagtgggacatgtcggcctttaccgtgatccagaaaccttaaaacccgtggaatactatgtcaagcttccttctgatgtggaagagcgtgaattcatcgtggttgacccgatgctcgctacaggcggttccgcagttgaagccattcacagccttaaaaaacgcggtgcgaaaaatatccgtttcatgtgtcttgtagcagcgccggagggtgtggaagaattgcagaagcatcattcggacgttgatatttacattgcggcgctagatgaaaaattaaatgaaaaaggatatattgttccaggtctcggagatgcgggtgaccgcatgtttggaacaaaataaaaaatgaaatccccaaaagggggtttcattttttatccagttttttgctattcggtgaatctgtatacaattataggtgaaaatgtgaacattctgtggagacgtaaagtataaaaagttttttaactttaaacagattgacacatgttaggggctattgtatgctaaacgagggtattatgagaaggttttcatagctttcattatagtcctcatcctcaatgtaaatcctctcagcaaacccgtattatgaggatttatttaagcgaatgaaacagcatccctgcaaggcttgcggatgaatgattttttcgaacaggcccgttttgccggtcaaaaaaggtcttctactaagggttaaccgctgatttttgccgtatccaagctatacattattttttcatcaggagacagataattgatggacgatcccaagcttacatttagcagacaacgcaaatatttattgttcattttggcagtgtatgtactgggttatggtttaacagcgtataaaaccgtttttttaggccttattctgggaactgttttcagtttgtttaattttttactgctcgtcagaagaatgaatgcttttgacagagctgttgagaaaggaaagtccatacgatctctcgggagcgcagcgcggtggtgcaatgcgattcttgctgtggctgttgcctataaaaatcccgaatactttcatatggcaagtacagttattggattaatgacaatataccctgtcattatgatagattcctttatccagcttaaacgttcatcaatggaagagaggtgaaaaccctttgaatcatggttacagaactatagaatttctaggtcttacttttaatctgacaaacattctgatgattactgtggcgagtgtgattgttttattgattgctatattgacgacaagaacgctttcgatccgtcccggaaaagcccagaactttatggaatggattgttgatttcgtccgcaatattattggcagtacaatggatttaaaaacaggggctaacttcttggcacttggtgtcacattgctgatgtacatatttgtgtcgaatatgctggggctgccgttctctattacaatcggacatgagctctggtggaagtctccgacagcagatcctgccattacattaacgctagccgtgatggttgttgctttaacccactactatggtgtgaagatgaaagggctcaaggaatattccaaagactatttaagacctgttccattcatgctcccgatgaaaatcatcgaagagtttgcgaatacgctgactctaggtttgcggctgtatggtaacatcttcgccggtgagattcttctcggcctgcttgcgggattagcaacaagccattattcgcaaagcgtggctctcggtcttgtcggtacaatcggtgcctttctgccgatgctggcatggcaagcattcagtttatttattggtgctatccaggcatttatctttacaatgctgacgatggtgtacatgtctcataaaatcagtcatgatcattaaaacattatatccaaacggataacattttaaaggaggaactttttcatgaatttaatagcagctgcgattgcaattggtttaggcgcacttggtgcaggtattggtaacggtttgattgtttcacgtacggtagaggggattgcccgtcagccggaagcaggtaaagaactgagaactcttatgttcatgggtatcgcattagttgaagcccttcctattatcgctgtcgttatcgcattcttagcgttctttggctaagcataaaagccttatatgaactaaaaatggcgaagatcattccaagagaaccttcgccattgctttatgtctgataagcatcccgccttgccggctgaaaagagacaagtgcggctgctggatcagcaaagaaaaacctgcagaagggagttgccgtagtagatgtctcaattaccacttgaactaggattgtcgtttaacggcggagatatcctgttccaactgttagctatgttaatcttattagcgcttctgaagaaatacgctttagggccgctattaaacataatgaaacagcgtgaagaccacatcgctggagaaattacgtctgctgaagaaaaaaataaagaagcgcagcagctgattgaagagcagcgcgttattttaaaagaagcaagacaggaatcccaaactcttatcgaaaacgcaaagaaactgggagagaagcaaaaagaagagattattcaggctgcacgtgcagaatctgaacgtctgaaagaagcagcaagaactgaaatcgtgaaggaaaaagaacaggcggtttctgctctccgtgagcaagtagcgtctctttctgtcatgattgcgtcgaaagtgatcgaaaaagaactggatgaacaagcgcaagagaaattgatccaggactatcttaaagaggtaggagaaagccgatgagtggatcagctgtctctaaacgatatgcatcagctctttttgatatagccaatgagtccgctcagctgaatcaagtagaagaagagctaactgttgtaaaacaagtatttcaaaatgaaaaagcgcttaatgatgtgttgaaccatccgaaggtgccggctgcgaagaaaaaagagctgatccaaaatgcatttggctctttgtcacagtccgtgcttaatacgatttttcttttgattgaccgccatcgtgccgcgattgtgcctgagctcacagatgagtttatcaaactcgcaaatgaggcccgtcaaacagaagacgcaatcgtatattcagtgaaaccgctgacggatgctgaaattttaccattatcacaagtgtttgcaaaaaaagccggagtcgcttcactgagaatcagaaatgaagtgcagacggatttaataggcggcattaaagtccgcattggaaaccggatttatgacggcagcgtaagcgggaagcttcagcgcattgaacgtcaattagccggggaaaatcgatagaaggggtgaaacctaagtgagcatcaaagctgaagagattagcacgctgataaaacagcaaatacaaaattatcaatctgatattgaagttcaagacgtaggtacagtcatccaagtcggtgacggtattgcacgtgtgcacggccttgacaactgtatggccggtgaacttgtcgaattttcaaacggtgttttgggtatggctcaaaaccttgaggaatcaaacgtaggtatcgtcatcttaggacctttcagtgagatccgtgagggagacgaagtaaaaagaacaggccgcatcatggaggttcctgttggtgaagagttaatcggccgtattgtaaatccgttaggccagccggtagacggacttggcccgatccttacaagcaaaactcgtccgattgagagccctgcaccaggcgttatggaccgtaaatccgttcatgaaccgcttcaaaccggtatcaaagcgatcgatgcactgattccaatcggccgcggccagcgtgagctgatcatcggtgaccgtcaaacaggtaaaacatctgttgcgatcgatgcgatcctgaaccaaaaagaccaagacatgatctgcgtatatgttgcgatcggccaaaaagaatcaacagtccgcggcgtagtagaaacattgcgtaaacacggcgcgcttgattatacaattgttgtaacggcgtctgcgtcacagccggcaccgcttctgtacctggcaccgtatgctggggttacaatggcagaagaatttatgtacagcggcaagcacgttcttgttgtatacgatgatctttctaaacaagcggccgcttaccgtgagctgtccttgcttcttcgccgtccgccaggccgtgaagcgttccctggggatgtattctatcttcattcccgtctgcttgagcgtgcagcaaagcttagcgacgcgaaaggcgcaggatcaattacagctctgccgttcgtagaaacacaagccggagatatctctgcttatattccgacgaacgtcatttccatcaccgacggacagatcttcctgcaatctgatttgttcttctcaggcgtacgtccagcgatcaatgccggattgtctgtatcccgcgtcggcggctcagcgcaaatcaaagcgatgaaaaaagtatcaggtactttgcgtcttgaccttgcgtcataccgtgagctggaagcattcgctcaattcggttctgacctcgaccaagcgactcaggcaaaactgaaccgcggtgcgcgtacagttgaagtgctgaagcaggatctgaacaagccgcttccggttgaaaagcaagtagccattctttatgcgctgacaaaaggatatctcgatgatattcctgtggcggatatcagacgttttgaagaagagtactacatgtaccttgaccaaaaccataaagacctgcttgacggaattgcgaaaacaggaaaccttcctgctgatgaagacttcaatgctgcaatcgaaggcttcaaacgcacatttgcaccaagcaactaactcgaatgctgatgagagaaaaaggttctctttttctctctttttacgcagatgaagagaaaaggtggtgaaatctttggcctcattacgcgatattaagtcaaggatcacgtcaacgaaaaaaacaagtcagattacaaaagccatgcagatggtatctgcggctaagctgaatcgtgctgaaaacaatgcaaaatcatttgtgccatatatggataaaatccaagaggttgtgtcaaacgtcggaagagtttccggcaacgtgaagcacccgatgcttctcagcagagaagtgaaaaaaacggcataccttgtcattacgtctgaccgcggtcttgccggcgcttttaacagttcggttttacggagtgcttatcaggccatgcaagaacgtcatcagtctaaggatgagtatgcggtgattgccatcggaagagtgggccgtgatttctttaagaaacgggagattccgatcatttccgagttaacaggacttggagatgaagtaacgtttacagaaattaaagatcttgcccgtcaaacgattcaaatgtttatagacggtgcgtttgatgaattgcaccttgtttataaccattttgtcagcgccattactcaagaagtaacggagaaaaaacttctgccgttatctgatttgggcagcggcggcggaaaaagaacggcgtcttatgaatttgaaccatctgaagaggaggttctggaggttttgcttcctcaatatgcagaaagcttaatcttcggtgcgcttcttgacagtaaagcaagtgagcacgctgcaagaatgacggcgatgaaaaacgcgacagacaacgcgaaggaacttatcgattcactttcgctttcttacaaccgcgctcgccaagcagccatcacacaagaaattacggaaattgtcggcggagcagccgctttagaatagaaagattttgtcaggagggatagcgatgaagaaaggacgcgttagccaggtattaggaccggtcgtcgacgtgcgttttgaagacggtcacttgcctgaaatttataatgcgattaaaatttcacagccagctgcaagtgaaaacgaagtaggtattgatttaacgcttgaggtcgctcttcatttaggtgatgatacagtccgtacaatcgcaatggcatctacggatggtgttcagcgcggtatggaagctgtagatacaggagcgccaatctcagtaccggttggtgatgtaacacttggacgtgtatttaacgttctcggagaaaatattgatttgaatgagccggttcctgcggatgcgaaaaaggatccgattcacagacaggcgccttcattcgatcagctttcaacagaagttgaaattcttgaaacaggtattaaagttgttgatttgcttgctccttacattaagggcggtaaaatcggattgttcggtggtgccggtgtaggtaaaaccgtattaatccaggaattaatcaacaacatcgcgcaagagcacggcggtatctctgtattcgccggcgtaggagagcgtactcgtgaagggaacgaccttttctacgaaatgagtgactctggcgtaatcaacaaaacagccatggtattcggacaaatgaacgagccgccgggcgcacgtatgcgtgttgctttgacaggccttacaatggctgagcacttccgtgatgtacaaggacaggacgtactgttcttcatcgataacattttccgtttcacacaagcgggttcagaggtttcagcccttcttggccgtatgccttcagcggttggttatcagccgacgcttgcaactgagatgggtcagctccaagagcgtatcacgtctacgaacgttggatcagttacatctatccaggcgatctacgtgcctgccgatgactacactgacccggcgccggcgacaacgttcgctcacttggatgcgacaacaaaccttgagcgtaaattaactgaaatgggtatttaccctgcggttgatccgttggcatctacatcacgcgcccttgctcctgaaattgtcggagaagagcattatgcggttgcgcgtgaagtacagtcaacgcttcagcgttacaaagagcttcaagatatcattgcgattctcggtatggatgaattaggcgaggaagacaaacttgtcgttcaccgcgcacgccgtatccagttcttcctttctcagaacttccacgtggctgaacagttcactggacaaaaaggttcttacgtgcctgtaaaagagacggtacaaggcttcaaagaaatcttagccggtaaatatgaccatcttccagaagatgcattccgtcttgtaggccgtatcgaagaagttgttgagaaagcaaaagaaatgggtgtagaagtttaatctggtcctaggagggtaaaagcatgaagaccgttaaagtcaatatcgttactcccgacggcccagtatacgatgcggatatcgaaatggtgagtgtgagagccgaaagcggcgatctcggtattttgccaggccatattccaaccgtggctcctcttaaaatcggcgctgtccgtctgaaaaaagacgggcagactgaaatggttgccgtcagcggcggttttgtagaagtccgtcctgatcaggtcaccatccttgcccaggctgccgagacagcagaaggcatcgataaagagcgcgctgaagctgcacgccagcgggcgcaggagcgtttgaatactcaatcagatgatactgacattcgtcgggctgagcttgcgttacagcgggctttgaacagattggatgtagcagggaaataagaaaaaatccttctctttatgagaaggatttttttatgaacgaacaagagaatcaaacagcgacagcagcgggcgatcctctttttggcgcaggtataaactatcacaggcattcattgtatgccacgatttgcgatgtcttctaaagccaagtgtataagcgccgtctttatagggataaggttttacaacccattcagcatcttcatggcgggcaatcacgcaatctataagataaacactgatcattttctcgaattcttcaataggaagattccaatcagcaagcaaaagctcttgtatactttgaaaatagaggttttcaagctcttcaaggctttctctcgtataggtaagagaaatgttaaaaaactgacacaattcattcagttcttcaatctgtgactgtctataatcataatagaatgcaattgcttcccattcctgatcaaaaattggcaggtcctcaccatattgcttttcaggctgaaaaaaagaatgattcacatttgccagctcctttccaataaagtataccatgtaaaagaatcgcactttaagcggggattagccctagatttggctgattattccgttctgtataaaatgtatcatctttatctgtgcttcttatataataagaaagggtatgaacgcagagaaaggagtgtaatagatgagtgtattgggacagcaggctgcaatcggcattgtcgttcacctgatttttatagcagtgacttggtgggcgttgcaagccgtcaatatagatccgttaatcaaaaaaggcaaagtcgtgcaggctagactcctgatgattttgctgacaattgccattggaacggccgttgctaatttctttttagattatctcaattattcacagcagcttccctatctattttaataggttttgaacattattatcattaaatggttgggagaagcgggttgaagcgaatagctcgagttttgacgaagatttttacgtatggcgcctcttgcctccggtaaaactggggataagggggagagatgaacatgaagaaaaaacaagtaagccacgctattatcatttccgtcatgttaagcttcgtcattgctgttttccataccatccatgcgagtgaattaacgccgttagcacaaatggcagaggggatggaacgccaagatgtgtcaatagataagtggacattgcatgcaaaacaaaacatgtcactgaccgaaaaagaattttatcaaaaagtgcaacgtttaaaatcagagtatcgtcaatatgattgggtgattgcacgggaagataaaatgataaaggcaattggcacatatactgacaaaaaaaatcgtacttcttttagactgcagcttgtcacaaccctcaaaaaacacaatccaacttcgtatttattatatgagcaaatgagtctagagacaccggatagctggaatgatacatatgaacagtttgaacgggagacacttgggatattccaagaaaaagtagttatttttacttgtctaaatggtcacttagatgataatatgaatattgttttgcaaaaaaaagcaaatcagttattaaatgaatttcaagcaagatcagtagaacatgtagttgagccaaatttcgtttctatttctgcgtttacagatgagtgggaagagtacattatgacctcgaaacataaaatgaatttgcaaattgcacttagaagtgcaggaatgggcggaaaacataccgttacggttggcacaccaatcgttacgactgaatattaatatagagaatttagggacgcggaggggaataccttggaaaaaatcatcgtccgcggcggtcagaagttaaacggcacagtcaaagttgaaggcgctaaaaatgccgttttacctgttatcgctgcatctttattagcaagtgaagaaaaaagcgtaatttgtgatgtacctacgctctccgatgtatatacaattaacgaagtgttgcgtcatttaggagcagatgtgcattttgaaaataatgaagtgactgtaaatgcttcatacgctttgcaaactgaagcaccttttgaatatgttcgtaaaatgcgtgcgtctgtgcttgtcatggggccgcttcttgcgcgtacaggtcatgcaagagttgcacttccgggcggatgcgcaattggttccagaccgattgatcagcatttaaaaggttttgaagcaatgggcgcagaaatcaaagtcggtaatggcttcattgaagctgaagtaaaaggccgactgcaaggcgcaaaaatttatctggacttcccaagtgtaggagctacagagaacctgattatggcagccgctctagctgaaggaacaactacgctggaaaacgtggcaaaagaacccgaaatcgttgatttagcaaactatatcaacggcatgggcggaaaaatccgcggagctggcaccggcaccatcaaaattgaaggagtcgaaaagcttcacggcgtaaaacaccatattattcctgaccgcattgaagcgggcacatttatggttgctgctgcaatcactgaaggaaacgtattagtaaaaggagcggttcctgaacacctcacctctttaattgcaaaaatggaagagatgggtgtaacaattaaggatgaaggtgaaggtctgcgtgtcatcggcccgaaagaacttaaaccgattgacatcaaaacaatgcctcacccgggcttcccgactgatatgcagtcacaaatgatggcgcttctgcttcgtgcaagcggcacaagcatgattacagaaaccgtttttgaaaaccgttttatgcatgcggaagaattccgccgtatgaatggtgatatcaagattgaaggacgttctgtcatcattaacggtcctgtacagcttcagggagctgaagttgcagcgactgatttgcgtgcaggtgcagcgctgattcttgcggggttagtggctgaaggtcacacacgtgttactgaattgaagcacttagaccgcggttacgttgatttccatcagaagcttgccgctctgggcgcagacatcgaacgtgtaaatgatgagtctgcttctgagcaagagaataaagaagtcgtttctgacttaaatgcataaacttacttgaaaatcagtatgtcactctggcatactggttttttattttttgtgtattatcatcattatgcgcaaaatagcaaaaaagaatacgtaaatgacaaataaagtttctgtccaaaacgagagtcatattagcttgtccctgcccatagactagactagagtcgaatcccgagcaggaggcagctgaatatgaaacaattcgcaatcacactatccgtactatgtgcattgattctcttggttcccacactcttggttataccattccagcataataaggaagccggggccagcgtagaatcagaaaagacagcagtcagcacgaaaccagcatcgaaaggagcagaaacattgaaagcatcacctgtttctattcccgtctatcgaaccgcaaatcaatccgtagaaaacattccgcttgaagagtatgtgattggagtcgtcgcctccgaaatgccggcaacctttgaatctgaagcactgaaagcccaggccctcgccgccagaacatttattgtcagactgatggtgtcaaattcagcggttgaggctcctaaaggctcactggtggatgatacacagatgttccaggtgtataaaaacaaagcggagctgaaaaaacagtggggcacaagctatgagacaaaactgaagaaaatcacagctgcggtagccagtacgcaaggcaaaatcttaacgtacaacaaccagccgattgaagcctcctttttctccacaagcaacggctacacagagaatgcagaagcttattggacaagtgctatcccatatttaaaaagcgtcaaaagcccatgggataaaaagtctccgaaatataaggcaacgaaaacctttacagcggcagaatttcagcaaaagcttggcgtcaagctggatggatctagcgcagtagggaagattaccggcgagacaccgggccaccaggtcgcaactgccgtcattaacggcaagacgctgaaaggaagagacatacgtgaaaagctgggtctcaactccgccgattttgaatggaagcgaaatggagacacaattacagtcacgacgagaggatttggccacggtgtggggatgagccaatacggagcgaattttatggccaaagaaggcaaaacggttgatgacattgtaaagtactattaccaaggcacacaaatttctgaggcagatgcgtttttgaataaatatatggcgaaaaagtagaaaaagacgctcattgggcgtctttttctgttcctgaatatcttttatctaagagcagctgaaacggtttagaggagcttctgaccgtctttaaggatcagtccttttttcctgatttcaggctttgagattgtggtaaagtcatccacatttgtcgacagacttcgacagactcatataacgaaagtcgaaaggcggacaatcttctcttttcataggggcgttaggtggaaatcactaataaaaacataggtttctatgcaaaagtaaacaacagcaatggggaagcccgccctatttatttctcggtttttgttgattacgatagattatgttcagcgttgaacatctgcacgcagaaacaaattggtaaaggggtacgaacatgaagaaaagattttcactgatcatgatgacaggattgctttttggattaacttcacctgcttttgcagctgaaaagacagaaacggatgctaaagcgccggcgaacgtggcggtcttgcttgatgccagcggaagtatggcgaaaagaatagatggtgtatctaaatttaattcagccaaaaaagaaatttcaaagtttgcgagctcattgccagaaggaactcaggtgaaaatgagcgtgtttggctctgaaggaaacaataaaaattccggaaaagttcagtcatgtgaagccattcgcaacgtatacggcttccaaagctttaacgagcaaagcttcctcaattctctcaatacaattgggccgactggctggacgccaattgccaaagcgctgaacgaggcgaaatcttcttttgaccagcttgatgcaaaaggggaaaaagtggtgtatctgttgacagacggtgaggaaacgtgcggaggaaacccgattaaaacagcaaaggaactgcaaaaagacaatatcactgttaatgtgatcggctttgattataaagagggatacaaaggccagctgaacgcaattgcgaaagtaggcggcggtgaatacttcccggcttatacccaaaaagatgttgagaaaattttcactcagcaatcactaatgttatctaaataagaaaaaagaggctggtgatggtcagcctctttttgtatgtaacaaaaacttcaaaactaattagctgtctgcctgtagcatagtagcagatttccgtttttctgtcataatcaaggcgaaaaaagaatgaatgatcacacaagctgtttatgctttctgggcggaaatggctaaaaatgaacggcatttcaagcgattttggacagatcgtgaaagcagcacaaaaggcagcatgtcctatatctttttgcattttcgtattctagcataaagaagaatccaacatatagttggaaaatatgaaaaagaaaggaagtaatcatatgaaaaaattgctggctgccggtatcattggattgttgactgtttccattgcctccccgtcttttgccgctgagaaacaggctgatacaaatgtagctgttttgtttgacggaagcggaagcatggttcaaaaaacaggaggagagcgcaaaatagacattgccaaaaaatcagtaaaatcttttgccgaactccttccgaaggatacaaatcttatgcttcgcgttttcgggcatgcagggaataataaactgtccggtaaagccctttcgtgcagtacgacggaaaccatttacggccttcatccatatgaagggtctctgtttgacaattcattgagtgagctcaagccgactggatggacaccgattgccaaagcacttgcagacacaagaaaagaatttgaagcatttgacgcagacgggaaaaacgtggtgtatttaatcactgacggtgaagaaacgtgcggcggagaccctgcggcagaaatcgaaaagctccgtgcatcaaatgtggatacgattgtaaacatcattggcttcaactttgatgtcaagggtaatgaagagatgaaacaagcagctgtcgctggcggcggagaatatatttcagcgaacagtgcggatgagttcgaacaggcttgggaaaaagaagcacaaaaatttactgagtaaggaacctaaagatcaggcgctcccccaggcgcctttttttattggtttaaaaacaatttgggcgggaatgataccctaaaaaggggttgaacatatgaaattattcggaatgatttttcttatagccaccgttgcattcatattgcttggtgttcttctaaaactggcagccttcttttttgtcagcattctcaccttgatcgcagctattgtgctgtttacggttctgaaaaagaatcagcataatcaaacatagagtcctttatatagagggctctcagcgtgtcgacaaaccccgcgttcgttgtcaatgcacattggtaaaaggaacggcggctaaatgcttaggcgccctgcctaaacaccgccgtcatcacatcctgtgaaagccctttatatagagggctctttttgtgtctcagaattcgacaaaatccgaggagtgtgaaaaaatataaaggcaggaacattgcggaggggaagagacattgaacgataaagtaactgcggtcagggatgtatggcgctatgaacaaggggaaataagcaaagtagaagaccggatggtgacggaattccctttgacagtgatactgaatggcagtgaatttgtgacgctcgtttgtacgcctgagcatatcgaagagcttgtcatcggatttctcgcatcagagggtgttatacgatttcaaaaagaaattaaaaggtttacaatagatgaaagtctcggttttgtatatgtcgacctcgttcaccctgagacattggatcaaaaggattatacgaaacgggtgatcggctcatgctgcggaaagggccgtcatttttattttcagcaggatgtcaaaacagccaagacggctgtcagccaaatcaagatatcgcctgaggcatgtctggcgcttatgaaagacatgcagcaagggagcgggacgtttcaggatacgggaggcgtccataatgcggcgctttgcgacacagagaagcttctgttgatgcgcaccgatatcggtcggcacaacgcacttgataaactatacggacactgccttctaaacgggatgtccgtacgcgacaaactgattgtgttcagcggcagaatctcatcagaggtcctgttaaaagcggccaaaatcggcgtgtcgattgtcatttccaaatcggccccgacggagcttgcgattcaaatggctgaagaattgaatatcacagcgattggatttgtcagaaacggatcatttaatgtatatacacaccctgagagaatcagggagtaggaaggggctgtagctatgattacagagtcgcgtcagatgttggataaaagaaacagaccgctgagagaccttcgcatttctgttacagaccgctgcaacttccgatgcacgtactgtatgcccgccgaattattcggcccggattatccttttttaaagaaagaggagctgctttcatttgaggagctggaacggcttgcgacattgtttgtcacaagatttggcgttgaaaaaatccgcttgaccggcggagagcccctcatgagaaaggatatgccggaattaatcaaaaaactggcccgcataccgggtattcgtgacatcgcgatgacgacaaacggatcactgctgcctgtttatgctaagaggctcaaggaggctgggctgaaaagggttacgatcagccttgattctttagaagacgagcgttttaagaagataaacgggcgcggtgtttctgtcagcaaggtgctggaaggcattgaagcggcgaagcaagcggggctcggtgttaaaatcaatatggtcgttcaaaagggcgtcaatgaaaaagatatactgcctatggcccgttattttaaagaaaaagggcatatcctgagattcattgaatttatggacgtaggcaacaccaaccaatgggaaaagaaagacgtcatgacaaaggcggaaatcatagatttgatcaataaacacatgccggttgagccgatagcgcctaattatataggcgaagtggcttccagattccgctacttggacggctccggagaaattggcgtcatatcatctgtatctgatgcattctgcggatcttgcaacagagcccgtctttctgcgagaggagagctgtttacctgcttattcgcttcaagcggatttgacctcagagctccggttcgccaggaattaagtgatgacgaactatcagaaatgatcgggacagtatggaaaaatcggatcgatcagtattcagtcgatcgtacgctatcaaaagcatctggcaaaaagaaagtggaaatgtcttatattggcggttaatttgaagtcaaaagcttatcggcactgtccggtaagcttttttattagaatccgagtgcaaaaaatacgtagaaaaaccgaaatatataaggataggcataaagaaggaatcattgtaagaaaatttaattccaaagccatacattatgataaaatataaccaattagaaaatagaaagggttggaggggcatggccgcgtacgagatcccgtcatctcaagtaggagtgaaaatcaataagtggtataagcacattttagcatttcaagtggctgatgccgtaaagctgaaagaagaaattgatctagatatcgaacagatggaagaggatcagctgcttctcctgtattatcagctgatcagctaccggcaccaaattatgctggattatgtaaagcctgacctgcacgaggaatctcagcttcaatatcgtgaattaatcaaaacgctggaaagcaatcaggacagcatctccggattatctgagtattattttcacttgtttagaggaatgtacgaatttgaacagaacaattacatctcggctatatccttttatcggaaagctgagaagatgcttgcgtttgtagaagatgaaattgaaagagcggaatttcattttaaagtggcggaagtcttttatattatgaagcagacgcacttttccatgaaccatgccgtacaggcgctggagacgtataaggctcacgatttttatagagtcagaagaattcaatgccatttcgtcatatcaggaaactacattgactacagaaattatgaaaaagcacttgaacatttagatgacgcgtatcgccttgctttattggaaggacagccccgtttaatcggatcagccctttataacattgggaattgctatgatgacaagggggagctggatcaggccgccgaatactttgaaaaagcgcttcctgtcttcgaggattatcagctggaacagcttccaaaagcgctcttcagcctgactcgcgttcttttcaaaaaacaagatagcgaagccgcgatacggtactatgaaaaagggattgccattgcccaaaaacgaaacgacttcttcagtctggcaaaatataaatttctgcaggcattatatgtggaatctgtcaatttggatatgattcaagaagtatttgattatatggaagaaaagggcctgtatgtatatattgaagaatttgctttagatgctgcctcttatttcagtcatcgcgaacaatataaagaagcggtgtatttttatgaaaaagcggtcagcatgagagagatgattcaaaggaacgattgcttatatgaagtatgagacaaaaccatctgctggcagatggttttttttatgcaaaaaaaggggagcatcggaacgtttatttccggggagaacaggaaaaatcgctacagcactgttttttgaacaaaaaccgttttgggatgcagatatgcatgtgagggggaattcaatgtttggttttaatgatatggtgaagtttctgtggtctttcctcattgttctgccgcttgtacagattatacatgtttcagggcacagctttatggcttttatttttggcggaaagggatcgttggatataggcatgggaaaaacgctgcttaaaattggacccatacggttcagaacgatttattttatcgattctttttgccggtacggggagttgaaaattgacaatcgtttctcaaatgcactcgtgtatgcagggggctgcttgtttaacctcatcacgatttttgcaatcaatctgctgattatacacagtgtattaaagccgaatgtgtttttctatcagtttgtctatttttctacgtattatgtgttttttgccctgctgccggtccgatattcggagaaaaagtcatcagacgggctggcgatatacaaggtgctccgttacggagagcgctacgaaatcgataaataacattagaatgtttaatgcctctcagatcgggaaggtaacaagtacacacataattgagaggggagaattaacatgggtaacgatagtgtaaaagacaaaatgaagggcggcttcaataaagccaaaggagaagtgaaggataaagtcggagatatggctgacagaacggacatgcaggctgaaggcaaaaaagataaggcaaaaggcgaaatccaaaaggatatcgggaaagccaaggataaattttcagataaagattaatcgtacggaagaggcaggaaacgaaatgtttcttgtctttttttgttcgctttttctgatgtgaataaatataacaaaaaaagaagctgatttggtcaaggtaactaaattttttaaatattctttgaattaataggcctcttctatataataatgacataagttgtaaacttttataacatcatttggagaaatcaaacaaaggggttttgatgacggaatgtactgcaccgaagaaagtgtcggaagccagcgggagtgcgaaaaaacagttaatatcgacacaagcgggattcagtgaaggccgggattcttcactcgttaagccgaacggtggcgatcagcgaaatgtccgtctatgatgcggagttaatggcaataatcgggttctcggtatcgtggaggacggcgtctcagactggcctccatgccatgcttccggttgcggagcaaaacaacgggctgccatcagaaatgtaacgtctggttatgatcaatcgatggtttagcacagcctcaacatggaggttcacccggggcagattgtcgctgtattaggccgaaatggagtcggccaatccacttcataggcctgcttccggctaaacaggggggctatttgttttaatcaaacgtttgttcaaaacgaaaaggcggtcaacagcagcagcttgcaatcgccagagcgctgatggtaaatctgaaaaatattttacttaataaacaattggaaggaatccagattttaattgtcgaactagtcagacaagttattatagaaatttccagaaaaaaagacatttgttatcttagtcgagcgcagtctggaaaacgcgttaatctgtgctgactatctttctgtgatcgacaggggaacggttgttgaccatggcaaggctgatgaagaaacggcatgccgctttgaaaggcatcttaccgtatgacccccattctcgaagaaagggaggtgatgtcccgcctgactgttccgcaaattcgtagtagccgcatctgctttatatgacaaaagaaggaggactacagatgaaactgacaccggttgaacaagagaaattgctcatttttgcagcgggggaattagccaaacagcgaaaggcgcggggcgttctgctgaactatcctgaggctgctgcttatatcacctgctttattatggaaggcgcacgtgatgggaagggagtagcagagctgatggaagccggccgccatgtattaacggaaaaagatgtgatggagggtgtccctaagatgctggacagcattcaggtggaggccacatttccggatggagtaaagcttgttacggtacatcagccaatttctgcggaggtgaagtcatgaagccgggagcatttcaaattgctgagggaaccattacgattaatgaaggccgtgagatacgggaggtaacggtaaaaaacaccggatcacgctccattcaagtcggttcgcattttcattttgcggaggccaacggggctttattatttgaccgtgaactggcgataggcatgcgtcttgatgttccatcaggcacgtcggtccgttttgagccgggagagcagaaaacggtctcactagtggaaatcagaggacgcaagacaattaaagggctgaacggaatggccgacacgtttatcgatgaacgcggcaaagaaaaaacgttggccaacttaaaacaagccggctggatggagggtgtaatccgatgaaaatgtcacgggaggaatatgcggaactgtttggcccgacaacgggcgataaaatcagattgggcgacacggatttatggatcgaagtcgaaaaggatttcacagtatacggtgaagaaatgatctttggcggcggaaaaacaatccgcgacggcatgggccaaaacggcagaatcacagggaaggacggcgctttggatttagttatcaccaacgtcgtgctattggattacacaggcattgtcaaagcggatgtcggtgtgaaagacggccggattgtcggtgtcggaaaaagcggaaatcctgatatcatggatggagtcgatccgcacatggtcatcggagcggggacagaggtgatttccggtgaaggcaaaattttaacagccgggggagtggacacgcacattcattttatttgtcctcagcagatggaagttgcgctttcttcgggtgtgacaacccttttgggaggcggaacaggacccgcaacaggcagcaaagcgacaacatgtacatccggcgcgtggtatatggcaaggatgctggaagcggccgaggagtttccgatcaatgtcggcttcttaggaaaagggaatgcatccgataaagcgccgctgatcgagcaggtggaagcaggcgccatcggccttaagcttcatgaagactggggcacgacgccaagcgccattaaaacgtgtatggaagtcgtggacgaggctgatattcaagttgccatccataccgatacgcttaacgaagcgggctttttggaaaacacgctcgacgcgatcggggaccgggtcattcatacttatcacattgaaggtgcaggcggcggccatgccccggatattatgaagctcgcttcttacgcgaacattctgccgtcatctacaacgccaaccattccttataccgttaatacgatggatgagcatcttgacatgatgatggtctgccaccatttagatgcgaaagtgcctgaagatgtggcgttcagccattccagaatcagggctgcgacgattgccgcggaggatattctccatgatatcggtgcgatcagcatgacatcatcggattcccaagcgatggggcgggtcggtgaagtgatcatccgaacatggcaggtagccgataaaatgaaaaaacagcgcggcgctcttgccggcgaaaacggaaatgacaatgtgcgcgcaaaacggtacattgccaaatacacgattaatccggcaattacgcacgggctcagccatgaagtcggctcggtggaaaaagggaagcttgctgatctcgttctgtgggacccggtatttttcggcgtaaaaccggaactggtcttaaagggcggcatgattgcacgtgcgcaaatgggagatccgaacgcgtccatcccgactcctgaaccggttttcatgcgccaaatgtatgcgtcttacggaaaagccaaccgctcaacctcgattacatttatgtctcaggcaagcatagagcgtggtgtggcggaaagcttagggctggaaaaaaggatttctccagtcaaaaatatcagaaagctgagcaagctggatatgaagctgaattcggctttgccgaagattgagattgatccaaaaacctatcaggtctttgctgacggggaggaattgtcttgccagcctgtcgattatgtcccccttggacaaagatatttcttattctgataagacgcggccggagtgcatccggccgttctattgactaaaaacggtgcacaaaacccgtgtatttagtgtatattagatgttgacaaacgaatcaaatgtaactattatagttacaacggtggtgaaaaaacatgattaacagccgtcttgctgttgccattcatattttatccctcatctcgatggatgaaaaaacatcttcagaaatcattgcagacagtgtcaacacgaatccggtagttgtgcgaagaatgatcagcctgctgaaaaaagctgatattctcacatcacgcgccggggtgccgggtgcaagcctcaaaaaagatcctgctgatatttctcttttagaagtgtaccgggctgtccaaaagcaagaagaactctttgcggttcatgaaaacccgaatccgaaatgtccggtagggaaaaaaattcagaacgctctggatgaaacgtttgaaagtgtgcaaagagcgatggaaaatgaactggcaagcaagtcattaaaagatgttatgaatcatctcttttaatcaaaagggatgacttctcaccgctaacatgtaactaaaattgttacaaataaggaggaaatgaaaaatgaaaattggtattataggcgcaagcgggaaagcgggaaacgagattttgaaagaagcgaaaacaagagaccatgaagtgacagccatcgtcagaaacgcttcaaaagtgcaggagcaggacgtagcggttttggagaaagatgtgtttgaactgactgtggaagacatcaagcctttcgacgcggtcgtaaacgcttttggagcagcacccggccaagaacatcttcatgttgaagcaggaagagcactcatcagcattttaaaggacgcgaagcacacaagattgcttgttgttggcggagcgggaagcctgtttgttgatgaagccaaaacaacccgtttaatggatacgccggaatttccgaaagaatatttgccaactgcatcaaatcaaggcgagaacctgaaagatttgcagcagacagactccatttcctggacgttcctcagtcctgcggcattttttgatccagcaggaaaacggactggctcttaccaaaaaggaaaagacaatgtcatcgtaaatgcaaaaggcggcagctatatcagctatgcagattatgccattgccgtgttggacgagcttgaacatcccgaacacaaaaatgaacgcttcacagtggtaagcgaagcggaataataaaaaacccggagccagctccgggtttttctcattaataagtgctgtacgtatcgctgaaaaggccatcagcaatcccaagcattaaaaagatgaagaaggcgataatcgcaagaatggatacagcaatgcttacgatcaaataaatcccttgcatctttacgaatttcgcgtaattctccagcattaagtcttcagactgtccgctattgtgttcagccatttggcctgcttccctagctgacctcatcaaaaagataccggaaataatttgcagtacgcctggcacggcaccgattagaaaaaagaacgcgcctgaaagcgcggtaattgcgcccataataataaataaaatgcctgtagcttttccccatttcgaaatgctgatgagggttttgttcattgtttcaggattcatgtatactggctcccctttacaaaaaaatactcacttttcttttatacactatttgtgagaagttttgtatatagaaaataacattttggggattgaccctaacgttgcgtgattgtttacgataaaaaagaggaggtgttatgtatgaaatatcaagttaaacaagtggcggagatatcaggcgttagcattcggacgcttcatcactatgacaatattgagcttctgaatccttcagcgcttactgatgctgggtatcgtttgtacagtgacgcagacctggaaagactgcagcagattttatttttcaaggaaatcgggtttcgtctggatgagattaaagagatgctggatcatccgaattttgaccggaaagcggcacttcagtcgcaaaaggagatattgatgaagaaaaaacaaagaatggatgagatgattcaaacaattgacaggacgcttttgtccgttgatggaggggaaacgatgaataagagggatttatttgccggattaagcatgaaagacattgaagagcaccagcagacatacgctgatgaagtcagaaagctgtatggaaaggaaatcgcagaagaaacagagaaaaggacatctgcatactcggcagatgattggcgcacgatcatggctgaatttgattcgatttacagacgaattgcgacgcgaatgaagcatgggcccgatgatgcagaggttcaggccgcagtgggggcatttcgcgatcatatttgccaatatcattacgattgcacactcgacattttcagaggactcggggaagtgtatatcactgacgagcgatttaccgattcaatcaatcaatatggagaaggtcttgccgcttttttgcgggacgcgatcatcatttactgtgaccatcaggaaaacccccggccgtaaaggccgggggtttttggcgcatcttataagatcggcgacaacagccgcgagacggattcttttattcgaatccacaacgggcgctgcagatactcctcataggtgaattttctggatactagcaaatcttctttaaaagttgaaaccagttttttagcaatggtgatatcgtatataaatgcattaacctcaaaattcagcctgaagcttcggacatcaatgttggctgtgccgactgacgcgatttcgtcatccaccacgatggttttcgcgtgaataaagccgttatcgtaaatatagacagtggctccggctttcagcagatcgccgatatacgaaagtgtcgcccagtatacaaaggcgtgatcgggcttgttcggaatcataatgttaacgtcaatgcccgaaaggcaagcgatccttaaagcatccagcaggcttgcatctgggataaaataaggtgtttgtatcaaaatggaacgcttggcgtttgaaatcattttgatgtagccatttttaatttgttcccattccgaatcagggccgcttgtgacaatctgcatcccgacgttgccttttgggccgtaatcaggaaagtgatttggaatatatgtcagcgtatggtgatgagaagcttggttccagtcaaggatgaaccgtgtttggatggcgtgcacggccgttccttgcagccggatatgcgtatcccgccaataaccgaattttggattaagccctagatactcatctccgacgttaaagcctccgacataaccggtcataccgtctatgatcacaagctttcgatggttccggtaattcagccgcaggttaatcggcctgagctttgacgggaaaaagacctccacatgcccgccagcctcgcgaagctctttaaaaaacttttttctcagcgttctagacccgagttcatcataaagcactctgacctgaacaccttcttttgccttttggatgagagcgtcccgcaattttttgcctaattcatcgcctttataaatataatactgtaaatggatatgatccttagcctttgaaatgtcactcagcagccgctgaaatttatcccgtccatctgtaatgacgtcaactgaattatcctctgtaaacacagcatggttattcataatcagcatataaattaaatctttgttatcaaaggttgcccggttgttaaactggaattgcttggtttctaaatcttcaagctgatgcttcagcagcctttcaattccaatctttttccggtcttcccattgaaacaaatgcttgcgtctgagattatggccgaatagtaagtataaaataaagcctaaaacgggaataaagaaaagaacaagcagccacgcccaagatgcactggcatcgcgccgttctttgaagatgacaatgatggccaaaagaatatttaaaatgaaaaaaagtgataaaaggatggaagaaatactcactttgtaaccccgctcattcatatttatcaagaagattgccattagtattccatgaataacagtgatctgattcccattacaaattataacactcacattttaaaagaataaagagcggcgatccagattcttcgtgaaaaatacgggcagatttctttaaaaccagcttgcacctgcgttaaaataaacacatatgataacgttcgtgaagcttgaaacatcaaataaagggggaggattatatgaacttttacagagtcgaacaaatgccggggttcatcaaaacagaaatgcaaaaaattcaaaaggccgtacagcctttcatgaaaaaaaccgtcatttaccgttttcttgctattccgcttgctgcattctctctctttaatttagctgcttttctatttcatgcttcagctgacagggagtccctgatcagcgcaggcatattcgcccttttggcggcgctcgggctcgcattttttaaagaggcaggctatcagcataaacaaatccaaaaaacggttcacatctatatgctgaacaggatcaaaaagagcgaaatcctttcagaagagcggaaaagctcctacgcacgacaaataaaggaagagccttttgcgatgcggagttttgttgaatttttgactgaggaagacagacgcaaaaaaatgtatgaataaaagctgcacccggattgttgggatttacaatcgggtgtttttttgtatgacttgggatatggacacgagttgttatttattttaaggtaacagcgttgctttgttgatttcctctactagtgatgcctgatcgatccatttggtcgacacatcttgattgatctttgaaatgtgccggttttctgttaaatagtctcttatcccgctgaaatagagcggttcgtttttgacatccaagttttgatatatttgttcaaacaattctaagtctttaggttcatctagggttaaacgccaagatggataatggagttctttcggcaggctgacttgattgatggtgaatagggaaggattgtttacaaaataaaaagaaagatattctgtatgggttaacggttttggctgctgcacaagccgctggagagcttcaacagtaataatattcccggaaattcctgctgaacttgaaagttcctgagtataatctgctcctttttgcaagtgctgttcaattaaatattgaagcacttcaggtgaaaccgctgggcaatcgccggtcacccggataatgatatcggcttttgttaaccccgcggcttcaagcattctttctgccacattttcgggggaaccccttacgattctgacctttccatttagagtgaaagcttcaagcggatcgtcatcaggaagatttgacgttgccaacacaacttcgtcaacagaagggacagccagacaattgattaaacagcgctcgacagatggaattccataaatcgggagcaacgctttttttggcaaacgggtcgattttagccggcatattaccgcaatcgtaattcttggttttttaatatcgttgggtgtaacaggctggtttaacgataaatcagcagttgcgacttgaggaaaagcgtcttcggcttgtaaaggcatcagtgcattttcatttccgcatcttttgtaacttgttttttccagcgttataatttctcctttttttatattccgattggcagtcacacgtaatgaggaatcgtgcaaatactttctttcagattcatttacttcagttgaccccgctgcaatttgggcctgcttaagcttttccgtcattagtttgaattcgtttggctctagtgaagaataataatcaaaccctttagctgcccggtttagggttatatgtttttcaataacagaggccccacagaaaaacgcatagacaggaaggtcggctgcaagcggatgctctgcgtcaatgtgatccgcaaatccaatttgaaccttgtatctatcctttagatgttgaacccgttttaggttaatatcctctaatgttgtgggatatccttggaatccgtgcatgagtatgagctgattgtccatatgtttttttacaagcggcatcaactgatcaatctcttcttcataccatcccccaactccgatgagcacaggcttctcagtcatacctatcgttttcatgatctccgtggattgaaggatggttgttggaagcttaatgccgtcaatgtctcgctgaaggtgcgaaaaaagctctgctccccatgaatcgaaaatatccacccatatttctagtccaaggctttttccatatgcgacacaatttttccatacgtcttcattcaaaaacagctcgatatacgactcataagcaaaaaaacaaggtgttgcaatacagtcatatttgaaccactgaaatttcacaccatctgctccgctttcagctgcagccttgatgagtgctctgaggttctcctcttttccttgatgggcgtttgcgatttcagctatcacttttactttttccgaagggctgttattttccaaatgtcccactcctttatgtttattgagacaaacctgctgatgccgctttcgagttgaaagaccgagtcattttaatagattgtatgcttgcttcaagacttggtgtttacgtcagcctgctttgactgataattttatggaaaatagacaaataaaataggcatggttccgtttatatggaactcatgccctgtcctgtctcatcattattcaaacaccggatcatcctcataataataagaatccggatcatcatacgaaggagtgttctcaaaagcagcaatgccgattaccaccagcacgaaaatggctacaatgatcccgatcaggacagtaacgatactggatgctgcataaaacagctgcatttttataaatgtcccgtaattttcaagcatgctttcgccagcgctgccggctagatttccgtcggcttccgcggctgcttttgctgagcgcatcaaaaatacgcctgatataatgagcagtacgcccgggatggcgccaatcactgtcatcaaagcagacagagtgacaagcgatcccataatgattaacaagatgccagaaattttgccccacttggcaatgtcggatagcgacttgacagcagaggcgctcagctggcgggtctcctgttcaacaggtgcagtctcctcttcaacgaggctattttcttcattatgattttcaatttcgttttcatctttatccagactaatcatgaaagctctctccctaaaatttttaaatcgtatcttttcccgtccatttcggcgatgccggggaatagtccccattctgcaaacccgtgcttttcaaacagcttcaggcttggtttattatgcccgaaaatgaaggccataagtgagcggatgccaagatccggcgcaatgcggagcgcttcctgaagcaaatatgatccaacgcctttgccgcggcatgcttcgtcaatgtatatgctgacctccgctgttttattataggctggccttccataaaatgtttcaaagctgatccaggcagcgacgtttccgttttcgtcctcggccacatagagcggacgtgcctctgtatgtcctaaaaaccattccatccggtcttcaggagttaccggttcggtatcggctgttaccattcgagaagcaatcgttgaattataaatcgccacaacagcctccaagtctctatgttcagcaaggcgcaatgtcatgttcatatgtttttggcactcctctcaaaaaaatacatattttcgttcagtctgtgcaaactacatctaaaaaagtttttttggataggttgtatatattttcagaaaagtgttcagaatgttgctgaggtgatgaaacaatgagagaggaagaaaagaaaacttctcaagtcaaaaaacttcagcagttttttcgtaaacgctgggtgttccctgcaatttacttagtcagtgcggccgtcattttaacagctgtcctttggtatcaatcagtatcaaatgatgaggtaaaggatcagttggctgataacggcggaaactccgcatatgacaacaacgacgatgcagttgaagtaggaaagtcaatggaaaatgtcgcaatgccagttgttgattctgaaaacgtttctgttgtgaaaaagttctatgaaaccgatgccgcaaaagaagagaaagaagcagcactcgttacctataataacacgtacagcctaagcaaaggaattgacttagctgagaaagacggaaaagatttcgatgtctctgcttctctgagcggtacggttgttaaagctgaaaaagatccagtgctgggatatgttgtggaagtagaacatgccgacggtttatcgactgtgtatcaatctctttccgaagtaagcgttgagcaaggtgacaaagtaaaacaaaatcaagtgatcggaaaatctggcaagaacctttacagtgaagacagcggaaaccacgtacactttgaaatccgtaaagatggggtcgcaatgaatccgttaaactttatggacaaaccagtttcttctattgaaaaagcagcagctgctgaagaaaaagctgccacccaagaaacagaagaatcaattcagcaatcttccgagaaaaaggacggatcaactgaaaaaggaacagaagaaaaatccggtgagaaaaaggatgattcaactgacaaatctggttccaaagaaagcagcacaacagaagacactgaacagtcttaatgaagaaaacgtctatccttgtgatgggcgtttttttctgttactttttgctttgttttaccgtctatgtagttacatgtaggcacgtacgttataaaggaggttatgtcatgaaccgcctattgctcgcaggctggatcttttttatcctgctttctgtctgtacggaaagcttcagcggcatggtcgtatcgcaaacggtggcttttcattttcagccgcaccctgatctgtctcaatttttagttatggattttactgagcttactgtacctgaagcgtttattcaaaaaatcggacacgcgttttccttctttgtgctggcatatttgctgtggatacagcggggcagcataagatcagctgcagccggctcatttgcgtttgcttttttcacagaagttcttcagctcttcttcagcaggaatggttgtatccgggatgtgctcatcgatgctgttggaattgggttgttttatggtttatatgtgttggcgaagcgaagaaaacaagagatgtatgagaaatattaaagccggctgtcttgatttcagacgccggcttttgtctttcttagaaattttgatcggttggttttttcgtcagtttattgataatggcttcgtagatcctcacgaccaaatcgacgaacgggcgaagcagatctgaaaatctaaagaaaaggaacccgataatgatggcgacaacgaggctgcccaatacatctaccggatagtgatgtcccacccaaattctcgaaaagcctgtcaaaagcccaaaaatgacaagcggccagccgattttgcggtttctgaaaagcatcgcaatagaaatcgctaatgcacctgtcgtatggtcacttggaaatgaagcatccgcagcatgcggaatcagtgtatgcactgtatgcgcaacgaacgggcgcggttcgaaataaacaagcgtaatcaaatagttgatcacaaggcctgcaattcctgtgatgcctgcgtatagcacatgttttctgctttgtgtgttcccaaacagccagattgccaataggataagggcataggcgacaatggcatattccgtgatgaagaccataatggaatcgagaactgaattgtgatgagatagtccatggattgctttaaaaatttcgtagttcaaataatcaccttttacatttttatatttagtagactaatcttactcatgaaaagtttcaaataaaaatagagattgtctgaaataacggcgcttgaagagaattcgaagaggaatcgcggtttctggggggattctgtgcacaaaaaaagagatccggagtgtccgaatctcgtaccgatattaaagtgcttcaggtccttcttcgcctgtgcggatgttgatcgtattgctgatttcatagacaaatattttaccgtcacctggtgatcccgttttcagcacccttttagcggtctctgtcacttgatcaacaggaaccttgctgaccacaatttctatttttaaacgctcgtatacattgctttctatttttacccctcgatagagctccgtatgtgctttttgaaggccgcagccgtgtacattggagaaagtcagagaggtcactccgatttttccgagttcctgcttcagcttttcaaaatttgccggacgcgttacaatttctaccttgaacatttgaccgctcatagcgtcactcctcacatagaatcttgatatgctttttccccgtgcatcgttaagtcaagcccaagtgactcttcttcttcagttgcgcgaaggggaaggaagaggcttacaaatttaataataacgaaagtgacaataaatacaaaaacataagtggcggcgatggcgacgatttgtttccagattaagcttgcatcaccgtaaaataacccatctgcgcccgctgagttaacagaggttgttgcgaataatcctgttgcgattccgccccatgtgccgccgatcccgtgcaggccaaaggcgtcaagcgcgtcgtcgtatccgaatttctttttaagcgagaatactccccagaaacaaactgccccgccgatgatgccgataataatggaagcgaacggtgtgacaaatccggcagccggcgtaatggcgacaagcccggcgattgcgccagataccgctccgagcattgtcggttttttgttaatgatccattctactaagatccagccggcgatcccggctgcagccgcggtgtttgtgttgatgaacgcgtacatggctacaccatctaaagtcaaagcgctgccgacgttaaagccgaaccagccgaaccaaatcaaagctcctcctaagaaggtgtaaatgaggttatgcggagaagacgctgtaccgtctttccgtttgccgagcacaatggcaagaacaagtcctgccacaccggaggaaatatgaacaacattgccgccagcaaaatcgagcgctccaagctggccgatccagccgccgccccatacccagtgcgctacgggtgtgtaaaccaaagaggcccataaaaccgagaataaaagaaaagcgccgaatcgcatccgctctgcgaaagccccggaaataatcgctgtagtcagaacggcgaacgtcatttggaacatcataaataacgagtgggggatggtatcgctgtaatctcccggatcaaatccgacccctttgaggccggcccactccagcccgccgatgattgaattgcctggtgcgaaggcaagtgtatatccgaacagcacccaaacgatggaaacgatggcaatggaagagaaactgtgcatggcagtgctcagcacatttttgctctttaccattcctccataaaataacgctaatcccggggtcatcagccacacgagtaaagcgcaaaagaacataaaaactgtatcgcccatttgcatgtctcattcctccgtatctttcagaataaaaagcaattattatatttcttcattatagagaaaaaagaatgataaaacattttcatgtaagattacctgacatggtttttaaggaatgttatcgagggacggaaaggaaggagaatggcattttttgcgatataagactttgtatctataaaagaagctattcatatgagctgaaaagggaattgacattaattagaatactctatactgtattaagtgtactatatcaaataatacacttagggggatgtatgatgaataaaggcggcaggctgaggaaagcggtacgcaagtcgattcccgcgacgttccgattgtttttagcctttaattttttcgtgtacggtctggcgaaagtggtaattggccagtttggcgaggtgacgcctgaaatcgaggcggctgccgggaaggggtttacgatcgcgtggacatttttcggttattctcatgtctatgaactgtttataggttttggtgaaatcctggcagctgttttattactgattccgcgaacggctgcattaggggcggttatttttatgcccattattgtgaacatcgtcttgattaactattgttttgacattggcgtgcaggatcttagcacgatattaatggttatgtgtcttatcctgctttggatggaccgccacaaattcatgggcattttcaggcaggaaccgatagacagcaggcaggtgatgaagcgatgacgccccttatgattacagtgcttgccggtttgttcgtatgcacaacctgttactactacataaaagaaaaatcatgagaaaacgctccttctgagaatttcacaagcatcataaaagaacttaggcattgtgaagagtaaaatatgcaatgtgagaaacactaacagtatcaggaggagacgtatgatgaatacactcaacattgattttcaaaaaacagcattggttatcattgatttacaaaagggaattgtgccgattgatcaaagcggccaggttgtcccgaacgcgaaaaagctcgtagataaatttcggaaacataacgggttcatcagctttgtaaatgtagcctttcatgatggagcggacgcactgaagccgcaaacggatgagcctgcgcagggaggttcaggggaaatgccggcggactgggctgaatttgttccggaaatgggtgtgcaggatggcgattatactgtgacaaaacggcaatggggtgctttttttggcacagatttagacttgcagctgagacggcgcggcattgatacgattgtattgtgcggcatcgcaacgaatatcggggtggaaagcacagcacgggaggcatttcagcttggctatcagcagatttttattacagatgccatgtccacatttagcgatgaagagcatgaagccacactgcgctttattttcccgagaatcggtaaatcgcgaacgacggaagagtttctggaacaagtgaaatgatgttgtcgaaaaaaagccgggctgtttttttaacagcggtggcttcgggaacaatgctgaatccgctgaactcgtctatgatctctcttgcgctccatagcatccagcatgagtttcacctctcgtttacaacggtttcctggctgatttcctcgttttacttggcgagtgccgtagcgcagccggttacgggaaagctcggtgatttgattgggcggaaacgcttgtttttattcgggcttattcttgttgcggtttctgccatcggggcgccgtttgcgccgacgtttatgacattattggtcatgcggctgtttcaatcggtggggagcagcgcgatttatccgtcaggtgtcggcttgattcggaatcatattcatgagcgccaagcttcagccttggctgtactctctatttttgcgtccgccatgacggcgctggggccgacagtcggcggttttttgattgtatggggaggctggccggcgatctttatcgttaatttgccgtttattatcctcagcttcttattgggcctgtatatgttcccgaaagatcagaaaaaaggggcaggaatcaaaaccattattcagcagctcgacattcttggaattgttttatttgccgggggaatcattttccttctatcctttttgctgtcgttcagcacgtcgccgcatgcggttgaaggtgtgcttggcttgcttctgctctgtgcgtttgtctggcgcgagctgaaaacggataagccgtttattgatgtccgtctgtttaaaacacagcgaaacctgtcagccgtgtatgttcagtttattttattgaatgttttcttctattgtttattttttggtctgccaagttactttcaggatgaaatgcatctttctgttcaaacgagcggcctgtttatgctgtttatgtctggaatgagcatcgttgtgtcacctttaactggaaaatggatcgaccgatctggtgtcgtcaaaccgatctttgcgggagcgcttttgatgacggctggagccgtgctcttaaccatcttttttatcaatgtcgagaccattgggaaaggcctcattctatcgctcttgggtataggctacggactgggaaatgtcgcgcttcaggcagcgatgctgaaaacgagtccttccaacatggtaggaacgacttcaggtctgtttcaaacctgccgttacctaggatcgattttgtcttcggtgatccttggcattctttttggtaaagaaatcacggcagcccattttgatatgatgggaatcattatgatcatagcgggcggagcaagcctgttaatggctgtgagatttgctgcattaatgaaaactgcatcttaagaaagagatgggctctgaggtctgtctctttttcttgtttaagctgttcaaatacaaacgggaaaattgtatatcatagccagtgttattgtctgacctttcagttatattaagtgacatctaatgtcaaaaaacataacatgtgatgacatatagacaatatggaaaggggagccggctatgaaattaaaagagagtcagcagcaatccaacaggctgagcaatgaagatctggtgcctttgggacaggaaaaacggacgtggaaagcaatgaactttgcctccatttggatgggatgtatacataacataccgacctacgcgaccgtgggaggattaattgcgatcggcctttcgccttggcaggtgctggcgatcattattacggcatcacttatcctatttggcgctcttgctttaaacggccatgcggggacaaaatacgggctgccgtttcccgtgatcattcgggcttcttacgggatatacggcgcgaatatccccgcgcttctaagggcgtttacagctatcatgtggcttggcatccagacctttgcgggcagcacggcactgaacattttgcttttgaatatgtggccaggctggggagaaattggcggcgagtggaacattctcggcattcacttgtccggtttgctttcctttgtattcttttgggccattcatttactcgtattgcatcacggcatggagtcgattaaacgttttgaggtgtgggcagggcctttagtgtatctggtatttggcggcatggtatggtgggccgttgatattgccggaggattgggcccgatatactctcaaccaggaaagtttcatacgttttcagaaacattctggccgtttgctgccggagttactggcatcatcggcatctgggcgacattgatcttaaatatacctgattttacacggtttgctgaaacacaaaaagagcaaatcaaaggacaattttacggcttgccgggaacgtttgcgcttttcgcattcgcaagtattacggtgacctccggctcgcaggtcgcgttcggagagccgatttgggatgttgtcgatattttggcgcggtttgataacccttatgtcatcgtcttgtccgtgatcacactctgcatcgccacgatctctgtaaatgtcgcggcgaacatcgtatcgcccgcttatgatatagcgaatgccctgccgaaatatatcaatttcaaacgtggcagctttatcacagcgttgctcgctttatttacggttccatggaagctgatggagagcgcgacaagcgtgtatgcgtttcttggcttaataggcggcatgcttggaccggtggcaggcgtgatgatggccgactattttatcattcgcaaacgtgagctctcggtagatgacctgtattccgaaacaggacggtatgtgtattggaagggctacaattaccgtgcgtttgcagccacaatgttaggagcgctgatttcgctgattggcatgtatgttcctgcattgaaaagcttatacgatatttcttggtttgtaggtgtgctaatctcctttcttttctacattgttctgatgcgtgttcacccgcctgcatcattggcaattgaaacggttgaacatgcgcaggtcagccaggctgaataagatctatttagacggtatattttcatatttttgaaatggttttccataaattaaacatttataattgttttagaaatctattctaaaacgaaatgggaatcgaaaatgagaaaatggtattttattcttttggcgggtgttttaacgtctgtcatcctcgctttcgtttatgataagacaaaagcgaatgaggaaggatctggggattatctgtatgtttcgctaaatggcagtgatcaaaatgaaggaacaaaagaaaaaccgtttcgtacattggcacacgcatctgagaaggctgctgccggcacaactgtcatgattcgggagggcacgtatcatgagacccttgatgtaaagcacagcggtacggacggaaagcctatcacattccgaaactatgaaaatgaaaacgtcgtgattagcggtgaatccattacgaacgctgaatatgaaacaccgcttattcgtattcacgataaacatgacattgccatcagcggtttaacaattcaagatctttctgtttcatctgaggaagcaactgctatagggatttatgtatcagggtccagcagtcatattgccattaaggataatcacatccggggtattaagacaactgcggatgaaggaaatgctcacggaatcgcagtttatgggactggcagcatgaaagacatccaaatcgaggacaatacagttgagaaactgacgcttggagcgagtgaagcagttgtgctgaacggtaatatcgacggcttcacagttgcaggcaatgtggtccgcaacaataacaacatcgggattgatctaattggttatgagggaaccgcggataaaaacgattacgtgcgaaacggaatcgtagaaaacaatacagtttatcaaaactcgacttacggcaatcctgcttatggagatgaatactcagcgggcgggatttatgtcgatggaggacacaagatcgaaattaagaacaacacagtttacgataacgatattgggattgaagcaacgtctgaacacaaaggaaagtatgcaaatgccattcagatcactgacaacaaagtgtacaacaatgcgtacaccggtatttcaatcggaggatatgacaaaaagcggggcggcaccagcaattctctgattgcccgcaatattatgtaccggaatgacacaaagggactgtacggcggacagctgctgctgcagtacgatacgaaaaacaacacaattgaaaagaatatattgacggccggtgattccagattatttatcggaaacgattttacagaaaatgaaggaaatacggtcaatcataacgtgtaccacaaggaagcggatcaagacggcatttggatgtggaaaaagaaagaatatgattcattttcgtcgtatctaaaagcaacaaaaaacgatcagcaatccatatatgccgatccgatgtttcgtgatgaagcgtcctatgatttttcgttagatcctgattcacctgcgcggcctgtcattgaataattgctataagcggcgttctcttagagagcgccgttttttatatgcaaaaaagactgccgggatttcccggcagcctgaaatttattctgcaatagacacttttccttcagcctctgcagtttttttctggctccacgtatagagaagcagagcaattaaaacgaacagccccgctgttaaataaatggcagagaagccggcagatgctacaaacaatccgaatacatacgatcctacagcaattccgctgtcaaagaaggtaaagaacgttgccgttgcaaaaccggagcggtgagccggagatttctgaatcgccaatgtttgcatgcaaggaacgattgatccgtagccaagaccgataaccgcccctgaaagcagaagcattaagccgctatgtgtgaaggacagcatgcagagtccaacagagaaaatcaggattgatgggtaaatgacaatgcccggtccgactttgtcgaacaatttccctgtgaacgggcgcgcaatcatcattgtcaccgcaaagcaaacaaagaaatatccgctgatatccgaaaggtcaactgatttggcgaatacagacagatatgatgtgactgttgaataacagaaagaaataaacaaaccgaccgtcgcaattttgagtgcgcccttttcaaacatatccgagaacgcaaaacggaatacagtcgtgccgctgtccttactttgcggcacttttatcaagaacgaaacaagtaagcccgcaaccataaacagcgcaaaggctgtaaagaatacaggaaagcttaccactctcatcaaattcaggccaaggaaaggcccgatcgccatagcgaggttcatagacatggcaaagtatccaagcccttcaccgcgccgtttggctggaataatatcagcggcaattgcacctgtaacagtcgttaaaatgctgaaccaaatcccttggaagaaccgcaatccgagcagcagggaaaagttatgaatcggcatatacagaaaagatgatagggcgaagagcgccattgatacaatcgccattcttttcttcccgaaacgctcaacgatggctccggagaaaggccgtgtaatgatcgcagacagaaggaacaggctgattaaaagcccgccttgtgattctgtgccgccaagctcttgcagcgtatagatcggcaatacagttaaaaatgtataaaagaacacaaacacaaataaattgacaagcaggaccataataaaatccttggtccatatcgcatccgcttttttcaaatgtatgtcacttccttattttcattgttgtaaaaacatgcggaataaatgagaaaaagcttctttatcttcatcccggaaatcagcaagcagctcttcctcgaatttcagcattttcacattgatttcttcatattttttctcggcttcttttgtgaggacaacaagtttttcccgtttgtcttcaccttgccgtctctgaacccagccgttctcctccaggcgtttgatcgtccgagtcacagtcggcgcttctacatttaaataggaccaaatctctttttgagtcattggtccgatcgtacgcaaacaatataaaactgaccattgagatgaataaaggccgaatggctctagctgttcattggctttcttggcaatcaggcgggcgctttggttgatttgatgaatgaggtgtctgttgacgtaggacatgtcggtctccttctaaaaaacttacctaagtaactaattgcttatttcattttacaggagcgatcaatagttgtaaagatgaaaatttagtgacgcgaaatagtttgctgaatctgaaaaagttcgtttcaccccttgtccttattgagtttttagcatattcccaaaagaatgctaatacactgttacaaacctaacaaagagagtgtttgaggtgagggatcgtgggcatatttcacaaacttacttttaaaaccatacaacgaagaagcggcataatgaacgactctttacagaatacggatctcatttcacacttctcacatccattttagggaggtcgagtggtgtgcacgattacatcaaagagcgaacaatcaagatagggaagtacatcgtggagacaaagaaaaccgttcgtgtcattgcgaaggaatttggtgtttccaaaagtacagtacacaaggatttaacagagcgtctgcctgaaattaaccccgacttggcaaacgaagtgaaagaaatactcgattatcataaatccatcaggcatttaagaggaggagaagcgacaaagctcaaatataaaaaagatgaaattctcgaaggagagcctgttcagcaatcgtaatcacctggcattgccttcttgaaatcgttcataaaacatccgcaaaaaattgtaaagaacttattgtgcttccaactttttttctatattttatgataatatatataattagggcacaatgtggatatttactgtgaaacagattttcaaggaggatataaatagatgtttgcaagggatattggtattgacctcggtactgcaaatgtactgatccatgttaaaggtaaaggaattgttctgaatgaaccttccgttgttgcacttgataaaaacagcggcaaagtgctggcggttggcgaagaggcaagacgaatggttggacgtacacctgggaatattgttgcgattcgcccgctgaaagacggagttattgctgactttgaagtaacagaagcaatgctgaaacattttattaacaagctgaatgtaaaaggcctgttctcaaagccgcgcatgctcatttgctgcccgacgaatattacatccgttgagcaaaaagcaattaaagaagctgcagaaaaaagcggcgggaaacatgtgtaccttgaagaagaacctaaagttgccgctatcggcgcgggtatggaaatattccagccaagcggtaacatggttgtagacatcggaggcgggacgacggatatcgcggttatttcaatgggcgatattgtcacctcctcttctattaaaatggctggggacaagtttgacatggaaatcttaaattatatcaaacgcgagtacaagctgctgatcggcgaacgtactgcggaggatattaagattaaagtcgcaactgttttcccagacgcacgtcacgaggaaatttccattcgcggacgggacatggtttccggtcttccaagaacaattacagtaaacagtaaagaagttgaagaagcccttcgtgaatctgtcgctgttattgttcaggctgcgaaacaagtgctcgaaagaacaccgcctgaactttctgctgatattattgaccgcggcgttattattaccggcggaggcgcgctcttaaacggccttgaccagctgcttgctgaagagctgaaggtaccggtcctcgttgctgaaaatcctatggattgcgtagccatcggcacaggtgtcatgcttgataatatggacaagcttcctaaacgcaaactaagctgatttcacaaacctcattctgaaaaagaatgaggtttttttatgaaaaagccttcacgaaaagatgttaaatgacgataataggataaaatactgagtttttattatagaacgaacgttcctatatgacaactggaaaaaatgccatttttagaggtgggaaatttgttaaaaggattatatacagcaacatccgcaatgattgcccagcagcgaagaacggaaatgctttcaaataatattgctaacgcaaatacatcaggatataaagctgatcaaggctctatgcgcgcgttccctgagatgctgcttagcagaatagaatcaaaatctccggccgggacatcaaggacggaaatcggttccgtgaataccggagtatatatgcaggagctcaagcctctctttacacagggaagcctgaagtccacagaccagcctacagacattgcattgatcgaaaatcaagttccgatcaatgcggaaaccaatgaaaaagctgctcttttttatccggttcaaacagcggatggaattcgttattcaaaaagcagcacattttcactaaatgagaacaatcagctgacgatcaacggacgccctattttatcgacggatcgccagccaatcactgttgataatgagaatttcactgtgtctgaaaacggtactgtgacaacgaacggacgcacagccggccagattgatgtcagaatggcggaagatgtccgcaatctcaaacgggacggaaatgatttgtacagcacggcggacggtaatgatctgccaagcgcagccggaaataatcaggtatcctattcattaaaacaaggcgtctcagagctttcaaacgtggatgtgacaagcgcctatacagaaatgactgaagcgtacagatcgtttgaggcgaatcagaaggttattcaggcttacgataaaagtatggataaagcagcaaatgaaattggaaaaatttaagataacggaagaaaaaacgggggacatcaactatgctcaggtcaatgctaacggcatcaacaaccttaaaccagctgcagcagcagattgacacaatcagcagcaacctttcaaacagcaacacaaccggctataaggcaaaagatacgaatttttctgagcttgtcagacagcaattcgatcaggttgatgaaaaaaacgaggaagtggcaaaagcccgaaaaacgccgcccggcttgcgccttggcgtcggagcgatgatgaattcacgcctggtctctgatcaaggaagcattcagaagaccgatcgcgatctggatatcgcatttacgtctccataccagtatcttcaggtaaatgtaaatggaaaccgccagtatacgagagacggagcattatatttaacgccttcagccaataatgccaaccagctgcagctcgtcactggaaatgggtatcccgtacttgatgagaacggcaatacagtgaacatcgacagctcaatgaagaatatcaccatcaataagaacggcaccttaaccgcatctgacggaaacgcggttcagcggtttaatcttggcgttgtccaagtgaataaccctcaagagctgaaatccgaagggaataaccttttctctattgataatgcggcagcttttgaagagctgaacggcgctaatagacaaaacatcggcatgcagcagggctcacttgagatgtccaatgtcgatatttcagaacaaatgacagatttgattacgtcccagcgttcatatcagctgaacagcagaacgatcacaatgggagatcaaatgctcggtttaatcaattcagtcagataataagaaaatgggcgtttttcaatcagccgcgcatgataaaaaaagcggctttttcgaaatcgtccttttttttgtagtattccgtaatatcttctaacagcacttctaaatccacccacgcctcgattttttctaattcaagcacatattcgagcagctgctcatagggatcttccactgaggtgtagagggcttcaagcgtttttaattttaaataaatggtttgaatgtctaccttttcagataattcttttcctttttgaaggacggctttagcttctgtgatgtttcctgttttaaaaagcgctctgacagactcgtacacacaatgaagatatgagactggtgaattcatttcaaattcttgattctttaatactttcctaaagtaaagaagcgcttcctggtcttttttctcggtcgcttttaaaaagccaaggttataataagcatggcatagcaggttttcgtcatgtagttgctgggttttcttaatgatttctttgaaaagctgttcagctttttcatagcgttcttgatcaatataattcacggcgagcaaaagtttacaggtgattacctttttgatatagccgaattggtgcaaatagatgtgtaatgcttttttgacgtattggacggaaagcggcggtgatttcatcaagtaataggcgccggcggtttgataatataaatcagcggcttcaaacgtattgtgaatggcggccaggtactgttcagcttttttaaaatgatgtactgcatgtttcggagctgtttttaccatctcatataacccagagaaaaaatacagataatatttcaattcatcatccattttgtcttccaggccatataggtcatcgaacaatgaatcgagtccgttctggttttcaaaaagcagctgatggcgggcctgaaacaattgataacgcatccaaagttttgtgttctttttgatcttcggaaggtgctggtcaattttctctttcagtgtgcaaacgtgattcattttgcgtttgctcattgcggaataccactcgtctaacatgtttagcattcttttttcaataaacttcgaaatcattttcctacctctttgctattggtaaaatctataattatcatatcataacttttgacggctctcattgacagttggttacattttagcgcggttgaaaaagagattaattcataatatacttttcaaatgtacagattggatctttgatgattgctatacatactaatgcagatgaaggagatgtcaagacaatgcttgatactcagcaaattaaagaaattattcctcaccgttatccgtttttgcttgtggatcggattacggaagttgaagagggcaaacgggcaaaaggctataaaaatgtaaccgctaatgaagagttctttaacggacattttcctcagtacccggttatgcccggcgtattaatcgtagaagcactcgctcaagtcggagctgttgcgatgttgattaaagaagaaaaccgcggcagactggctttttttgcaggcattgataactgccgctttaaaaaacaagtcaagcctggtgaccagcttcaccttgaggttgaaatcattcgtgcccgcggcacaatcgggcgcggaaaaggcgttgccacagttgatggcgaagtcgtttgcgaagtagaactgacttttgccctcggagaataattgaaaaaaggcaaatggccagcggcacatttgtctttttttctttacaaatatagaaaagcaggtgattgtatgtggaatgaatttaaagcctttgccatgcgggggaatatcgtagaccttgcgattggtgttgtgataggcggcgctttcggaaagatcgtcacatctctagtaaatgatatcattatgcctttggtcggtttgctgctgggagggcttgacttttcaggcctgtcgtttacgtttggcgatgctgtagtgaagtatggcagctttatacagacgattgtgaacttcttaattatatcgttctccatttttatcgtcattcggactttgaatgggttaaggcgcaaaaaagaagcagcagaagaagaggctgcggaggaagcggtggatgcgcaggaggagctgctgaaagaaatcagagacctgctgaagcagcaagcaaagtcgccggaataaaaaagatgccgttagaaacggcgtctttttttatctcaattttcgtttaggttcgttctgtgtcctttagttctttagggcttcctgttgtttcagcgagatgaatgagcattgagacagaggtgcctgcatccggagtgctgctgatcatcaactcgcttccgcaaaaatgtttcagccgctgattgatatttttcaatccgacgctgcgatcaaaatccgttgataagagatctatttgtttttccggagttatcccgggaccgttatcctctactttgatgtgatactcatttttgctttgttttttagctgtcagtttgatccatcctccgcctcttttcttgctgacaccatgaagaacggcattttccaccaagggctgaatcattaaaggcggaaggataaagtcaatgtcttcatctatatcgaaaagaacctcaagccgattaccgaatcgcgtcttttctatagaaagataggaattgataatcgaaagctcatgtctgaaggaactgatggctgatgtattttgaaagtcaaaactcattcttaaatagttggtaaattcctctgttacctcccgggccttttcaatatccaaatgagtgagagaaataatcgtgtttaatacattataaagaaaatgaggcttgatttgcgactggagaaacgccatttccattctagttgcttgatttgctgtatgtttcatcatgatcaggttttgaatacgcaccataaattcagagtaatgataaggtttttgcaaaatgtcattcgctccggcatgaaaagccttgtatttgtcatggccgataatggcagctgtaatgatcagaaccggaagatccaccatgctgaatcgttcgcgaattttcatacagacttcgaaaccagtcatatccggcatcataaagtcacagcttcaggccttgcaccgggacaatacgcttttgttgaaacgaaagcgccagccggttatgtgctgaacactgagaaaatagagtttgagatttctgattcctctgaaggaaagcctgaagctacagatgccgggatcgccattaaagcattccagtcaagtggagaacgtcgaaagctcgtgaaatatacttatttttacttcacaatcaaggcggctgataacaattaaaagtgtcgcttccgatcgtaaaaggcacaaccaatgaaaatcttttgataggggcggcaacaatgcgcccggatcaaaaaatgggtgagggaaattatccgttggcgggccatcatttgaagcaaaagaatcttctgttcggacctctggaaaacataaaaacaggtgcccaaattgtcatcacggattttaaaaaggattatatctattctgtaacatctaaagacatcatatcggaaatggatgcagatgtagttgaagagacaaacaaaaaagagattacgttaatcacatgtgacaaggcggtcaaaactgaagggcgccttgttgtgaaagggaaattggttgattcttttggccatacaaattaaatatgcaagagagaaagcacgaaaagaaaagctgccgttcaaaacggcagcttttttcatgcagaacatatctattcaaaatgtctattgtgatgctcttcggttctgtgtctgttttggggaacatgccccctcatatttataacttttgtttaaatgcctcaatgagttttgttcctgtatagccctcttttacaagggactcgagaatggtttcagtgccctgctgttttcttgtgaccatttgtccatagagtaaaacctggatgctttcttccagcttgacgatatttttcactgctgctgtcagctgggcggggcgattgctttttttcgtgatcgttacaaatactttggcttcagattggctgttttgaagctgttcaaaaaaagacagatgttctttctgtacaagcgcctcaatcagccagtgattttcaccgtcttctttatttataatcagtccgtcaataaggggaaactgttcaattgattgttcttccttgtccactcgttccacatttaggtcaaccagtttaaaggttttcatttcttctcaccccgattacttccaaagttttcttgccctccattataacataaacgttttcgaggaaaaaatcctgcaatgctggggctaaagaattttgtatgagcgaaacatttaataatttctattttttcattatactgtaactgactatggattacggagagatgtggtatgaatcaatttcgtttaaaagaaatttatattgacggcgctccttctgaaagccatttgattcaaaaggaagtaacatatatgttaagccgtaaagaagtgtttgaggttcatctgaacaaaaaaggaagaataagttttttatacgaaacacaagatggcatggagcagtataaaatcaagctgtcaatgccggaaaaaaaattgagctttcagtggtttgcgtgggatggctcttcctatgtgcgcatgaatacgcaaaactggctgacaaagcaaatctttttccgttttttaaaaagtacatatttcttcaaaggaaaaaagcaaaagatgtttttagctgaaggaaaaatgaaaacgaaagataaaaacagaggctgaaagccatttttaagcgtttttcttttcttgttgcatcatttacaatacatacaaccgcaaggagaggaggaatcgcatgttcaatcaggtcatgcttgtcggacgtcttacaaaagatcctgatcttcgctacacttcagccggtgcggcagttgcacatgttacgctcgcggtgaaccgcagcttcaagaatgcttcaggtgaaatcgaagctgattacgtcaattgcacactttggagaaaaacagctgaaaacacggcgttgtattgccaaaaaggttctctcgtcggcgtaagcggacggattcagacaagaagctatgaaaacgcggaaggcgttaacgtgtatgtaacagaagtgttggctgacactgttcgttttatggaccctaaacccagggaaaaagctgctgattgacaacccctgctcctcccgttttctatccattcactattatccgaatcttcgcatcatcccctcaaaattgaccagtcgaccagactggttctttctttttgtccacttaggaaaaattggttctctcgacgcatttttacttaaaatcacttattaatgttgaataaaattaaataaaaacttataattacttataaatgattgctgagaaaaggaatgagggcgtgtaccaagaagaaagattagtagcgattttggattttttaaaacagcataaccgaattacaacggagcagatctgtacgctcctgcaagtgtcaagggatacagcgcgacgtgatcttgtgaaacttgaggaacagaatgccatcatccgcacaagaggcggcgccattttgccgactgtgcatcagaaaattcaaagctattccggccgcctgaaaacagtgtctgaggaaaaaaataagatcggcaggcttgcagcatcgcttattcatgatggtgaccgggtgattttagacgcctctacaactgttcaggcatgtgcaaagcatttgaatgcggttgattgtacggtaatcaccaattcgattaatcttgcggatgtgctgtccgataaagagggaattgaaatttatctgctgggaggcaagctggaaaaggagcaccgctttctgtacgggtcctctgtgattgaaaagctctcaagctaccatgttgataaagcgctgattggtgtggtcggcatttccgaacatggcattacaattgcgcatgaagaggatggcatggtgaagcggaaaatgatacagcaggcaaagcaggtcatcgcgcttgcagatcattcgaagctgggcagcaccagtttttatcagtatgcggagctgaatgaaatcgaccttttgattacagacaggcttccgaatcaggcattttgtgacttgcttgaccgaaacggcgttgagcttctcgtgacagagcaggatgaaggaaaggactgacaaacgtgaaattaattgcgattgatttagatggaaccttactcaacagcaagcatcaggtaagcttggaaaatgaaaacgcactgcggcaggcgcagctggacggcattgaagtggtggtgtcaactgggcgcgctcattttgacgtcatgtcaatctttgaaccgctggggatcaaaacatgggtcatcagtgcaaacggcgccgtcattcacgatcccgacggcaggctttatcatcacgaaacgattgataagaaacgggcgtatgacattctctcatggcttgagtcggaaaactattattatgaggtattcacaggttcagcgatttatacgccgcaaaacggcagagaacttcttgatgttgagctggacagattcagaagcgcaaatccggaagcggatctttctgtccttaagcaggcggccgaggtgcaatacagccaatcgggctttgcttacattaactcttttcaagagctgtttgaagtcaatcagccaatcgatttttacaatattctcggcttttctttcttcaaagaaaagcttgaggcaggctggaaaagatatgagcatgccgaagatttgacgcttgtcagttcggctgagcacaactttgagctttcttcccgcaaagcttccaaggggcaggcgctgaagaggcttgcaaaacagctgaatattccgctcgaggaaaccgctgctgtaggtgacagtttaaatgacaaatcgatgctggaggctgcgggaaaaggtgtagcgatgggcaatgcccgggaagacatcaaatcgatagccgatgctgtcaccttaaccaatgacgaacatggtgtcgcacatatgatgaaacatttgttgtaagtatatgtgctgccacaaaagcgcatcctgttgataaccggcgtaacggattttttggaaattcggcgtgacggctatgaacggaaaaaagctggctctatcagagccagcttttttagtcatgatcattgcgctgtagcgcttaatgtaaacagttcttcaagctcctgtgtggaaagctcggtaatccagttttcactttggataatttgatcgttcagggtttgcttggattcaagcatgacatcaattttttcttcgattgttcccgtcgtaatcattttatgaacgtggacaaagcgctcctggcctatgcggtatgcacggtcagtcgcttgattttcaaccgccgggttccaccatctgtcataatggatgacgtgattggcggcggtcaaattaagtccggtgcctccagctttgagtgaaagaatcagtgtcggatattctttcctttgaaatttctcaacgagtgtatcccgctcttgcttagagagactcccatttaaaaattgcacaggttccccgaacgttttttcaagcagccgcttcatcatgttccccatctgaatgtattgcgtgaaaatcaggcagctttcgttttgagcgcggatcgctgtcatcagttccagcaatttttcgagcttgactgatctgccggccagcagctcggtttgctcttcctttaaataaagcgcgggatgatcgcatatttgcttgagccgtccaagcatgctgaggatcagcgcttttcgctgcatgccggtcagggatgtcatatggtcaaaagtgtctttgacgagctgctcataaagggatgcctgctcggctgacagagggataaattctttttcttccagcttctcaggaagattaagcgcgacctcttcatcccgtttcgtccggcggagaaggaatggccggattaattgctgaagctgtccgattctcttttcgtcacggtctttttcgatcggcagcacatagcgtttatggaagccggtcaaactgccgaggtagcctttattcatgaagtcaaaaatggaccacagctcagtcaggcggttttccattggcgtgccgctcagcgcgatatggtgaagccccttcagcttcctgattgcgcgtgactgcttcgtatgcgcgtttttaatattttgcgcttcatcaaggcagatcgtgttccatgtcacagaagaaagctcttcagtatcggcatgtgacagtccatatgaagtgagcaccacgtctgcgttttcataatgcgcggcgaaatcatcaccctttggccggcgcggcccataatggagcgcgacagacagatcaggggcaaaggtttgaagctcccgctgccagttgccaagtacggatgtcggcgcaataatcaaatgaggcgttttttgccggcctatttccttcacgtgaaggaaataggcgatcatttgaatcgttttcccaagccccatatcgtcagccagacaggcgccaaaaccgctttcccgcagaaacagcagccagttcatgccgtatttctgataagggcggagcgttcctttgaaagaaggactgacttcgtgctccggcaggttttccgcggcagtgagctttcgaatcagtgacctgagctgtttagacagatcaaactgaatgccggcgaaagcggatgtatcaatcagatccgaatcctcaagtccgccatcctgctgatccattagctcacgcgccagaatatcagacatgtggagtccctctgattctgctttttccatcaggcgtttcatctgtttgataaactgcggatcgattttaacccattgcccgcggatattaacaaggcgcctgttgctggcgacaagctcattaaattcagcctcagtcagttcaattccatttgtcgcaaaccgccagttaaaatcaagcagtgcattcatgccgacaaatgactcgccgcgcggggaggacgacacctttgctttcagcatcatgttgctgtctctgacaatctgccaccaggacggcaggaggatttctacccccatatcgacaagcgcctcacttgcttctgacaggaagatccaggcttcttcctccgagatcagcgttgtcccggaatcaaacgacagccacggaaccgttctgtgaaagcggtcctgctcacgcgcgattttatcgctgtacgcctgccacgattttttgaggctcttcagtccgtcaaagaattctacagcaccgctctttttatcgcgtaaaaacatctcgatcttccattcgtctccgtcaaagtccggttcatttaagcgcaagccgacagtaaatggagattggtcgtcaatccagccaatgccttccagaaaatcctcttcatcaagaaaatggccgcggaatgtcgtaaccgcaggcgatttctccttgatatgttcccatttctcccgcaggtcatcgtcgtactggatgtaatcctgtacggcagcggaaaaccattccgcagtaaagccctccagtatattatcgcggtccttccagcgaaaaacaccgtttgtccatgcgtcatagtcaggcataaaatcgccgtccgcgataaattcatagatggtcgatgccgcctcgatcagcggctccgtttcttctgtaagctgcacggagctgaatgagttgaacgagtttttgccgagaagctctacagtcatccatggagatagcaggacagcagtcgtcccgatgaagctgacatcctctagaaaggttccgtaaaatgaggattcatgccattggaacaaatgctttttcatatggttgtagggaagaggctgctcattctcatcaaaggctgagagcgtaaatgacccatcttccatttgttcgacgtggatgagaatttctttaagactcgccatcaatcaactttcctttctgcagttcttcttgaagcgcacgcaggcgcttgtaatgcgagctcagcagctgaatataccgctcccacaccttctgctttttcgcttttttgtacagggtgcgcaattttttcaaataccgggcggcttccttgtacgagctgcggttcttctgatcaatgaaaaaagccacttctctatggtaagccggtataagcgcctcagggtcgctcgctgcaatttccttgagcatcattttatccatttcattgatggaaaagccgacaaggctatgaatttcaatccactcagcatagcgttttttttcatataaatgatggctgtattctgtgaacgtatacggcagacagcccgcggcaaagcgctcaaacagcgcttgatcattggtttgctgcacataggcattcaacagaaggaacagctcgccgatcacatcgcgaatctctttaaacggcttatccagcttcgtataacccatcgcaattggctcaatttgctggtaccatgttttaagccgtttccagtccttcttggcagtcatttcactcagccattggaacgtataagggagcgcttccggcgggaattgatccgcttccgcaaaaataacgtcatcattcttttgcaggaattccaaatgcaggcgcccgaattgcaattcgggagaaaaacgccgtcctgcttcttttttcaatatctcctgttcgcgtgccacccattttggccgcgacagcagcgcactccaaatttcaccgaagacgcggatgcgttcatattggaaaatttcttctttcaacagcaaatgtcggataacatccggtgttttatccaaaaacggatcaagcgcaaaagacagcgcgtatgtttttaatttatcaatagagctgtagattgtatccatcagctgttcaacgtacggattgagggaataaaaatcttgttcggggttcagcttgcctgcttcaatcaatgtgaacatgcgaagccaaaccgcaattgcggaatgaatttggtacaggcttttcagctccggcttgttcggcgcatgtttttttaatgcggacaggtagccgtaatagaggccctgcatgttttggctgccttctggcgtacgtgcctgccagagagaaaactctgaatcaaaaaaagcaagccagcttgaaagcgattcttcattaggcagcaccttttcctgaaactggcggcggacgagctctttgctttcctcaagcttttccctctccagccaatactctgtaaaagtacccactcgctcgaacattgcatatacatataaaaacacagccagcatatggcggcagattcttccggacggacatgaacagccgcttttgactatgacaaacaagttcaatgtgacccgcacaggcacaacatcctgcacgtaagccgtaacttccgtcggactcactgcttgtaaacgatagactgaatcctgccgatataaaataagggcttttttgatcagctgaacattttcctcattgtaaggaagaagttcttttaactgttcagcagatgccagcacatcgtctttggaaatcatattctgaagcatgattatcgctcctaaccgagtcacgtaataaaaagatccaatttctctattatatcgcaacacatcggccttaaaaagtttttcctaaaaaaggacataaaaaatgggatgtgtcgaatgatgtattagagattgcaaattgataaccagcatcatataataatcgtgttttcaacttaatggaagctgaaaggaaaaaaaagatgagtgaaaagaaattgaatcaagaagaatttctgaaaattttgatgcatgcacatgaaattggtgagcagtcatctgagatgacgacgaaggaaatgcttgaaaatttgatttctcatattaaaaatggatatgcaacataaaaatcccgcacgcctttagcgggatttttttatgcgaggttacgtgactgcacgaataagagaaaatgagacagcgctgtcaacacagtaaatatagcgcttacataaaaaagagtaacatttcgttttgtaaaaaatgtcgaattatgtcacgtgaaaagctggagaaatgcggtttcaacgttgtataatcgtaaatggaaaaggatgttataagagatttggaggtatcatgggagaatctactagcttaaaagagatattatcaacgttaacaaaacgcatacttttgattatgattgtaaccgcagctgccactgctgccggcggactcattagtttcttcgcacttacacccatctatgaaaattcaactcagattctggtcaaccaatcgaaaaatgaacgaaaagaagtccaatttaacgatgtccaaaccaatcttcagttaatcaatacgtacaatgtcatcattaagagccctgccatcttagatgaagtcattaaagaaatgggcctgtcgatgacatcccaagaactgaatgacaaaattaccgtatccagcgaacaggactcccaagtggtcaacatatcagtcagggatgaaaacgcggaaacagcggctcatattgccaatactatagcatctgtttttcaagacaaaatcacatccattatgaatgttgacaatgtcagcattctgtcaaaagccgaggtttcagaacatccgtcccctgtatcgccaaagccgctactaaacattgccatcgcgtttgcggccggattggcgggaagcatcggactggccttcctgcttgagcatttggataatacgatcaaatcggaagagcagctcgaatccttgctggacatacctgttttagggacagtttccaccattgcgaatgagcagaaaacagcaaagaccttacagggtttccaatctgaaaaaacggggagtggacattttggcgcttagaaaaagcagagactcgcggatgcggagaaatgtcattgcaatgacagagccgaaatccttgaactctgaacaatatcggacgattcgcacgaatatagaatttgcttcagtggaccggcaaatgaaatcagtcatgattacatcggcttgtccgggggaaggaaaatcaacaacggccgccaacctggctgtcgtattcgcccaacagggaaaaaaagtgctcctgattgatgctgatttgcgaaaaccaacagtacatacggctttttttcttgaaaatacggttggcttaacatctgttttattaaagaaaagctctatggagcaggctgtacaagcatcgaatgaaaaacatcttgacgtgctgacgagcggcccgatcccgccaaacccggccgagcttctctcctcgaagtggatgaaggagcttgcatacgaagcgtgtgcggcatatgatatggtcatttttgatacgccgcctattcttgccgtagcagatgcacagattttaggcaacgtggcagacggttctgttctggttatttcaagcgggaaaacagaaaaagaacaagccgcaaaagcgaaagaggcgcttgaaacgtgcaaaagcaagctccttggggcgattatgaacggcaaaaagctttcgaagcactctgaatacggatattacggaaacaaggacaatttcatgcaaaaataaataacgtgcatcatgcccgttatttatttttgcgaaaaaagggggctaggacatgatcgatattcactgtcacattcttcccgcaatggatgacggggcaggtgattcggccgacagcatagaaatggcaagagccgctgttcgtcagggaatccggacgatcattgcgacacctcatcataacaacggtgtgtataaaaacgagccagccgcagtcagagaagcagcagatcagttaaacaaacgtttaatcaaagaagacattcctttacatgtgcttccgggacaggaaatcagaatctacggcgaggtggaacaagaccttgccaaacgtcagctgctttcgctgaatgatacaaaatacatcttgattgagtttccgtttgatcacgttccccgatatgcggagcagcttttttatgatttgcagctgaaaggatatattccggttatcgcccatcctgaacgcaacagggaaattcgcgaaaacccgtccttgctgtatcatcttgtagaaaaaggagcagcatctcagattacttcaggaagtcttgcggggaccttcggaaagcagctgaaagcattttctctccggctagttgaagccaatttgatccatttcgtagcctcagatgcccataatgtgaaaacgagaaattttcacactcaagaggctctttatgttctagaaaaagaattcggctcggaacctccttatatgctgagggaaaatgcagagcttctcctgcggaatcagaccatcttcagacagcctccgcaaccggtcaaaagaagaaaattgtttggtcttttttaacagccgattctcatttcaccactttctttttgagagcgatataatagtgtattgtatgattgaatcacatttcagaaatctgtacaggctgtacccgacaggctatgcgggagatcattcgcattcatgataggatgttctcatacgatattacggaagctgcaaagcagcaatttaactgttggagggaaacaatgaatataacagtcatcggaacaggctatgtcggtcttgtgacaggtgtttctctttctgagattggacatcatgtaacctgcattgatattgacgctcacaagattgatgaaatgagaaagggcatttcccccatatttgaaccaggtcttgaagagctgatgagaaaaaatacagctgatggacggctgaactttgaaacgagctatgagaaaggcttggcacaggcagacatcatttttatagcggtcggcacaccacagaaaagcgacgggcacgccaatctggagcaaattacagatgcggccaaacgcatcgcaaagcatgtcaaacgagatacagtcgtggtaacgaaaagcacagtgcccgttgggacaaacgatttgattaatggactgatcactgaacatctagcggagcctgtcagtatttcggtcgcatccaatccagaatttttgcgtgaggggtcggcgatctatgatacctttcatggtgacaggatcgtgatcgggacggccgatgagaaaacagcaaatacgctggaggagcttttccgtccttttcaaatcccgatataccaaacggatatcagaagcgccgagatgatcaaatatgcctcaaatgcttttctggccactaagatcagttttataaacgaaatttcgaatatatgtgaaaaggtcggcgccgatattgaagcagtcgcgtacgggatgggacaggataagcggatcgggagccagtttttgaaagcgggcataggctacggcggctcttgttttccaaaggacacaaacgccctcgtgcaaattgccggcaatgtcgagcatgattttgaactgctgaaatcggttatcaaagtcaacaacaatcagcaggcgatgctggttgataaagcgctgaacaggctcggcggggtgacgggaaaaacgattgcccttttaggcctgtcatttaaaccgaataccgacgatatgagagaagcgccgtcaattgttattgcagaccgtctcgctgcgctcgacgcccgtatcagagcctacgatcccattgcagttggtcatgcaaagcatgttctcccgcaagctgttgaatataaagagacgatcgaggaagctgtcaaaggttctgacgccgtcatgattttaaccgactgggctgacattaaacaatttccgttagcggcttatcgggatttgatggaatcgccgctcatatttgacggcagaaactgctacacattggatgaagctgcggcttcaggagtggagtattattctgtcggtcggaaggcggttgttccgtcaggtgcaattcaatagatgaaaaagaaaggctggttgcgtaccagtcttttttttcatctattgcggggtgctgaatacatttgctactatttaactattgtttggaaaattatacagaagtagggcttctttaaacaatcgtttgaaaaacattagaagaaacgaagaaaaccagaaaataaaaccttggagatgccggaaaaggagagaatctgatgaatcatctgcccgaaaaaatgagaccgtaccgcgacttgctggagaaatcagcgaaagaatacgtgaaactgaatgtgagaaaagggaaaacaggacgatatgacagcaaaattgccggtgatccctatttccccaagcatgaaacatacccgactgatgaaaatggacagccgatgaagcttctggcacagattaatttctcacacattccccagcttgacggctacccttcttcaggtatcctgcagttctacatttctgttcatgatgacgtctatggattgaattttgacgatcgatgtgaacaaaagaatttcagagtgatctattttgaaaatatcatagaaaacgaagacgagcttgtttctgatttttcatttatcggcacaggcgaatgtgattttccgattttatcagaagcggcagtcgagcctgtgaaatcttcggaatgggtgctgcctacagattttcaatttgagcattatacgggcatggaaacaatggagttctttggtcagttcggcgaggatgaagaagacatttataatgaactggctgaaaacggatttggccataaaatcggcggatacgcttcttttacccagcatgatccacgggaatacgcatataaagaacacaccatcatgcttttacaaattgattcagacgatgatatcgattcaatgtggggagacgtcggcatcgccaattttttcatcacacctgacgatctaaggaaaaaagacttttcaaacgttctgtacaactgggactgcagctaatacaagcttttgatccaaagggtcagaagcggggaataatagaagccaaatgacaaaatcagacgtggccgaccagatgaagaacataaacatgaacaataagctcagcgccgaaagaggcagatcaacaacatctgcctctttcaagtgcctttataactatgacattaggtatttctatttgataaaacgcttttattaactgtataacgaacaaaaacaagatcaaatacctacatttcaagagcgttatatgcctaaattaagccatttaccctatttaagccgccttctggctattttaaaatataatatatggaaataaagtatggaaaagtctatcttcatcagcccctccatacgactttttgagtattaagaggtgattcagatgggttatgaaagtatgctagcggatatcaaaagttcgctcaacggaaaaatttccgacgtggaagacaagatcgaaaagctgaaaaaagcaaaaaaggacatagacacgctgcaagaagaggcaatcactgaaatcaaagaaattgtaaaaccagaattgggcaagcattggacgggaacaaaagccgatgatttcgacaagggaagagaagaggcgaaatcggaagcatctaagattgtgaatgataaatataacgagtatatggcttcgattcaaagcaaaatattctggcttgagacagagaaatttgagcttaatttgacaaaaagtgcagcgaatgccgcaggcgaccttcttgctaaaggagaagatttcgtagaagaagcaggaagacaaattagtaaactaaaatggtggtgatctttttttatgtcagaaattaagctgaagtacgacacagtcatcaaaacattagattctgtcaaagatgcgcttgctgacgtatcaatcagcgccgcaggatccaacggaaaaaacagcctcgattatacgaaaaaataccatgagcgtgaggagaacatcaaaaccatgctcggagattacaaaaaagcggtacagaaaaatatcgaggatacaaaggataacgtagattcactcaaagagcaggacgaggcgatagcggtaaaatagaacagaaagggctgtgcgatgagtaaagtatttgaatcaaaatctttaatcgaagaagcgaagagcagaaaaaagcaatatgagacgcttgaggagcagctgaatacgctgaaaaaagcgtttcagggagttgcagatttaggcgataattttaaaggaaaaggcgcggacaatattaaagatttctttcagggacaggcggaaatcgtcgaaagctggctgacgcttgtctctgctcaaattgcatttttaaacggcatttcaggcgatattaaagatcaagaactgaatgattcatatgtggaaacttcatttttggatcatgagctgcccaatggagacctgaaagcctcagagatagtctccgctcataaagaagaaatcgattctattttgtcaggcatcagcgatattattgatctcgacatgtacacgcttgacgagtatgcagataagatgggcgatgcccaaaaagtcagacgtgacacgatcacagctgtcgataagcttgatgaatccctgaccactgaatatcaaaatttagaatctctggacaacgcagtgctcaccaaataaaacataagtgcttacaatttagaacacgctaaatattatcgagatgtagcaagaccaggcggagaaattgtagaatttaaggtacctaaagagattgatgatttaatcaaggagacagtaattgatcagtatggatatactaaaaaccctcgtaaccaggggagaactgctccaaagcttgttgatcctacgacaccgggagttagttatgaacttccggcggaaccatggatagagtggttagaggaatatgggcattcagccaaaaaaatagaatgagaaagtggtgttttcgttgttattaaaaccggagtatgcccaaaatataatagtcggggtaaagacttcttctcaattctcatggtatctaacagaaagagatgtttggatactagatatcatgaaatataaagaagcctatgaaaaaaacgggtttagttttgatatggactttgctctttctctaagaaataacatttcagttgtaaatgaagataattatcgtctttatttaaaagaatatactgactatattatcccgtcttcagaattaaagaagttagttgaacatcaggattatgaaagtactattctagaattaaggccatcattatatatagactttaatcaaaaaatgcttctttcgctgtatcctgagttattaccttttgaaaattatgttcctaataattggacaggggttcgggaagactttactagttatattcctgaagaggatagatactggatttttgatgaagtaaattatatagacaaagtttttaatgagaaagaaagagagtaaaggagaaaataaaatgtcaaaagatgatagcttggtaataataaatgaaagttttaaaaaggagggtagtgaagaagatatagaaggattaacaataatgattgatggggttataaagcaggtttttaataaaataagaaatgaaagaaattataacagtaataatgaagttatgagagatattatatttgaaggaattaatagtattgttaaaaaatcttaaggcattattaaaaacaaataaacgcttcgagttggtttgattttctaccttgattggcactgaagcctttcaaggtttttttattagtttgttgtccactgttttatatagcgtaaataagtataggctttgaacgcgtcacagtcggcaccatggcagccgtgggatttataccagtcgtcggctgggcaggccgcgccttcaaaggcggaaaagccatctacaaaaccggaaaagctgctatcgcggctgaacacgctttagacgcctacaaaacaggcaaatccttagacattctcaaaatgacagaaatgggtgcatacggccttgttgcgtcaaacggattctcagaagccgtcacgggacgggatatgtttggaaacaaagtgtctgaggagaagcggaagcagggggcgctggaagctgtgctgagtttggttggagccggtgcactggcgaaacatattgataaaggcatcccgcttgcaacccattcaaaagtccaaaaagcaaacaaaacactagagaaagtaaaacaattcaaagtcccaacaaacgtccgcgtgtacgcagaacgccctgtaactccggatggctttacattcggaatcccgacagtacgtgtcgatgtggaaaagacggctgttaaggatcttgggattgtgaagatggttagtgatggcggtcgtaagggaagctctcatagtcctaacatttctaaaaatcacgataaagtagcacacgatggatattatggtcgtaaagaatttagaacgatgcttaataatgcttcgtttactccgcatggccataaacatgttaaggctaaaacacctgaagaagcaaaacgttttagtatgacaggtaaaaaagctgctcagtacttaccagatgtgaataacaaagctttagaaaaagaggcacttctaaaaggtcatattattgataatggaaataacaactattatttcatttatgatgcaggaaaaacagtcggttatgatctaggtacaccaacaagctggattagagcggagttttctggtggtgaatatcatggtcatccgattgctggaagtcgattagataagtatttaaaacaacttggtattgataagtaataggaggcttttatgagaaagataaaaaaaatgccagaaataagtttacaacccttaaggattccaaaaggatggaccataaatcaaaacagttttagagaaattgatccgaaaaacctagcaccagacgatgaaaaatggttgtttttttcacaagatttaatgcaattaacatactctcgtaaaaattacttacttgatttaggttggtatccagatgcggatgctaatggattttatcaactagttatgatgcaaaatgaggattgggatcaacccatatatgaatttcagacaaatagccatattgaaatagttaaaaatatagaatttatattaaacaaagttacgaataatgaaatgtagttaaacatttaattagaactattaataaagtttgcagaacctggagttgtaagttttcaaagtaaaaatgaatacaaagaaaaacagacactagttaacaggaggtaggattgattttagatgcatgttaaacaaatacattctttcaacctaaacagagaagaatttgtaaaaacacaacaatcccttatccataaaatcaacctatccacctccatcaacctagactccatcaacacctgcgcaggcgtcgatctcgcctattgggagcagaacggagaaccatacggagtgtgcagtattatcgtgattgacgctgatacaaaagaagtcattgaaaaagtgcatagtatggggaaaatcagcgtaccgtatgtttccggttttcttgcgtttcgtgagctgcctttgatcatcgaggcggcgaaaaagctggagacggagccggatgtcttcttgtttgatggcaacggatatctgcattacaaccatatgggcgttgccacccatgcggctttttttctgggtaagccgacgattgggatagcgaaaacctatctcaaaatcaaaggctgcgatttcgtgacgcctgaaaatgaagtaggagcatacaccgatattatcattgacggtgaggtatatggacgggcgctgcggacgcggcgggatgttaagcctattttcttgtcttgcggaaataacattgatttagacagcagctatcagatcaccatgagcttgatcaatcaagaaagcagattgccaatccctgtccgcctggctgaccttgaaacgcatgttttgcgaacgttttatcagaaaaatcacatgtaacacttggggctctaagtcatcaagtgtttttttgtatgtgtgtgctttcctggtctcaaaaaccttgtcgtccttgtggagaggttttatttgaatgttttccgtgtcaaatcgataaaagcctttaatggcgcagacatccatttgtccttatgccatgctaattgagtgaaaacggggcaatcactctgccaattgagttctttcatccggcctgctgcaatatcatcttttactgtcatttcaggcaagattccaatcccaagtccggccatcacgcattgtttgatggcttctatgctgacgaattccaatttgttaggatagacaccggagtcatgcaaattgttctcaaagagcgtgcggtacgagcagccgtcctctgtcagcagaagagtttcgttttgaagatccttcaatgttactggtaaatccgcaggaaaaggatggtcattagcagccaccattttgatctcatcctgaatcaaagattcaacgtgcagtgcgtcttccatccggtttacatccaagatgaaggtgatatcaagctggccctgtaagagctgttctttcgcttgttcattggagatatatggtttgaatatgagctttacttggggaaaagcctgtttaaattcttttatgatagggggcaggcggtatgtgcactggctttctgtcgccccgatttttaaggttccggttgtttctcttacttgatttgcggccattttcgcttcttctgttaacgcaatgatcttctgtgcataagatttgaacgtttttcctgcttctgtcaagataagccgcttgccgagccgttcaaataaaggcgtcccaatttcttcttcaagtgatttgatctgagaggtaacgcttgattgtgcataattaagcattttggcggttagggtgaagtttacatgttctgccgccgtaataaaggtgatcagctgcttcaattccacttgttctcttcctttctaaatcggttttagcgattggattaatcgaaataatcatctgtcttgattgatgaatccattataagatgaagaaaatcattcgtaaacaaaggagcagatgcatcatgaaaattgcggttattaacggcggaactcggtctggcggaaatacggatgttcttgcggagaaggctgttcaaggattcgatgcggagcacatttatttgcagaaatatcgaattcagccaattgaagatctgcgtcacgcccaaggcggctttcgtcctgttcaagatgactacgattctatcattgaacggatattgcagtgccatattcttgtattcgccaccccaatttattggtttggcatgtcagggacattaaagctgtttattgatcgctggtcacagacgttgagagatccgagatttcctgattttaaacagcaaatgtcagtgaaacaggcatatgtaatagcagtgggcggagacaatccaaaaataaaagggctgccgctgattcagcaattcgaacatatttttcattttatgggaatgtcctttaaaggctatgtgctgggagaaggcaatcgtccaggcgatattcttcgtgatcatcaggcgctgtccgctgcgggccgcttactgaaaagaagcgatgcgatatgaagtttttgctgtcggtcattgctggcttgctgattcttgcactctatttattttggaaggtccagcctcctgtttggatacaagttgaaaccaattcgtccgagttgaagcaatctgtgagaatggcaggaaccacgctgcaagtcaagcacatcatcaagagtgacgcaggagaagaaacagctgtcatatcaaacggcatttctgggccaaaataaaaaagcacctgtccaggtgcttttttctataaatgagggatcacaaggcccccatataaaaacgccgcgataatcaaaaatgccggatgcattttgaattttgtcatggcaaggagcgaaattcccgcaatcacgatcgattggatccagccgatcgctttgatgccatctgcgccgatttgccaggtaagaatgagcatcatgaccgcgatgacaggctggacggacagcgtcatgcctttgatgacaggtgattggcggaagcgctggatgatgcgcagcaggacgatcaatgcgagcgccgacggtacgacggttgcgatcagggcaattaggaagccgggccacccgcctgcgctgtagccgacatacgcagcgattttcgtggcgatcgggcccggcaaagcgttcgcaagtgcgagcatatttgagaattgatcgtttgagagccagctgtatctgtttacaacttcttcaaacattagcgggatagacgcaggtccgccgccatatcccagtaggtttgcgataaaaaacgccataaataaatagatcgatatcatgaggctgacattcctttatcttttgaatgtttatttgtgattttgtctttcagtttaaaatgaaacgccccgtacgctaagaaaatgataatgaccaggccgggattaatctgtaaagtttgcaggccgataaaagcgatgataaaaaacaggatgccggtaacccagccgaaacctttaagcgctttttggccaaactcgtacgccatgattccgagcattaccgcaattaccggcgtgacggcaccgatcatacctgcaacaattgctgaatggcttaacacatttacagccgcaaacaagcccaccatcgcaagacatgtaggcagaatgtgggcgagggtcgccacaactgcacctaatgtgccttttagcttaaagcccagataagcagccattttggtggcaatcggtccgggaagcgcattagcgattgctaatatttctccgaattcatcatcgtcaatccatttatatttattgaccgcttcatggcggatcagcggaatcacggaaggtccgccgccgaaccctaatatgccggtgcgaaccattgcggccgtcatatcccgataaggatggtttttcattcgtttctctcctttacagcttcattcccatacggcttttgtatcgtttgatcagcatctggcaatcaacactgacgacgcctcgcaatggatacagccgttttgttaagaattcttccatttcttgatcgttggcaaagatcccatgcatatgcagcttgctcgggcctgtcatgtgataaaggctggtgaccgcaggctcttcctcaagcttaagagcgacctcttctaaaaattgcggttctacctcgacattgaaaaacacggaaacatgaatgccgattttagcgggattgatgacagcggtgaatttttcaataacaccggcttcaattaattggttgatacgggcctggacggcgacccgtgacaaatcgactcttttgccaagatccgtataagaaattctgccttcttcatgcaaaatcgtgagaatttgtttatcagtctcatcaagtacaaggttggggatttgatattcatgactcaattgctccacctgctttcgtagccttttagcaatcattttatcataaaagttacgtatcgaaataataattttttatttgttttcgaaatgaatgcaaaaatatcttgttatttgcgaaaagtagaaagttcgtcagtttttctgccggatcagtagatgtgaaaaatcaggctccctatactgaagaaaatttcttaaaaaaggggacttgtgatgaacaaatctgtcatcggtacaaagcaaatgatcgtcagtccgcattacctcgcttctcaagccggaaaccgcatactggataagggaggcaacgcgtttgacgccgctgttgcggtgagtgcttgtcttgcggttgtgtacccgcatatgaccggacttggcggggattccttttggctgacctttcaccaggaaacaaaggcagtaaaagtctacaatggcagcggcagttcaggaaaaaacgtaacgagagatgtatataagggaaaaagcgcgattccgctgcggggaattgacagtgccattaccgtgccgggaatggttgatagctgggatgcggtcctgaaggagtacgggcgtctgtctcttgcagatgtattggagcccgcacgcgattatgcccaaaatgggtttcctgtatcagctgatcagtgtcgtcacacagaaaagaatattgaattgctggcttccacgccttacacggctgacatcttcacaagaaggggcaaagcacctgtcccgggagagcggtttgtgcaaaaagagcttgcagacagtctgaacttgattgctgaaaaaggaagaagcgcattttatgaaggagatctcgctcagcggattgtctcacatttacagaataacggcagttacatgacaatcgatgattttaaagcgcatcggggtgagtgggcagtgcctgtatcaagtgattatcgagggtacagtgtgtatcaggcgccgccaaattctcagggatttaccggtttattaacactgaacattttggaaaactatgatttcacccaaatcgaacacggttcatttgagtattatcacgtgcttgtggaggcattgaaaaagagttttctagatcgggatgccgtcctgactgatccggcgtttgcagacattccgcttgaaaggcttttggacaaacgttatgcaaaacaattggcagaagaaatcggctatctcgcaataccggcagaaagcaggccggtgggaagtgatacggcatatgcggccgtaatcgatgcggatggcaacgcagtgtcattcattcaaagcctgtactttgaatttggctcggcagtcactgccggtgatacaggcatattactgcaaaaccgcggatcgtttttctcactggatgaaaatcatgtcaacacgcttgaaccgagaaagcgcaccttccatacgttgatgccggctatggtctgtaaaggcggaaagccaaaaattctgtacggcacacaaggcggcgaaggccagccgcagactcagacggccatcattacccgaatgctggactacggaatgcatccacagcaggcaatcagcgaaccgcgctgggtatggggcagaacgtggggagaggaatacgaaggtctcagagtcgagggcagattcacagacaaaacaatccaaaaactgaaagacagcgggcatctcgtggaggttgtcggtgactatgatccgctgatgggacaagcggctgcaatcaaagttgatgaagaaggctttctccaaggcggagccgatcctcggggagacggagcggctgtggggatttaaataactatagggtacaaatataaatcaaaagcataaacataagggagacctctacaatgtggtacataaactgtttatcttcaggtctataatgccactccataaaaattcgtattgagtcaatcacaataaaaaataaaagaagcaaatattcaactggaaaaaaggagagtgaaaacacaaacaaaataagtaaagtgatttcgatccatttgtgtgtattgctgacatgcttatatcgccagccggatttatcaataccgtattttttctttataaaaaattgagaggcgagactgatggtaatagcgatcagcattaaaatccaaaagtttgtcattccaattcctcctaatctacctatatacgaagaaaaaggaaaaacgtttcataaaagaacaccccgagcttactctgggtgttctttttttgatattttttcagttatttacaggcgatattttgtaatcataaggtctttttgactagtttcttctatttaaatagtccttctcttcagctgggacgaatcagtgtgaattcttcccccagcttggcatagtgatttcccgccaatcgtgaggcaggctttaattcatccgttaaaatatatcccttttctgcatcatacaccttttcatctaggtggaagcagacaactcttccgatgagcagatctgctgtagtgatgccttgatcattgtcaaaggtaatatgccgctctaatttgcactcaaagcgaacgcgggcttccttaatgccgggaactgaaacagctttgctttcaacaggatgaagtgaggtgcgtgtaagttcgctttcatccggccttaagcttgcagctgtttcattgatatcttcaatgatggcttcatcactgacatgaacgacaaattctccgttctccactgcgtttcgcgctgtatctttttggcgtcctttcgtcctgttaacagaaatactgagaagcggaggatctgagctgacgacgttataaaaactgaaaggcgcggcattgaccgctccttctgaagaaagtgttgtcacaaatgcaatggggcggggaataacggtacctgacaatagcttgtatgtgtctttggcactaagctgatcagcttgaaatatgtacatagcaacaaccgcctttatcgttaggataccttgattataacgaaatggtttaaaggaaaccaaatgatgcgggttgcatatgttatgtcatgacatatatctaatacagggcaaataaaaaaataggcttccgtacctccgccggcagcctattgaaacaatgaaaacttagattatttgtatttctttttgactacccagcaattgccgtctttccagtattcttttttgctgtcataatcatcgtgtcttttgtagtcgtcgcagtggtggtacggttttttgtagtatttcttatgggaacgataagattttttgtgtgtgcggcatgactttttatagctgcgagattttttcttgtgagaacagtatgactttttgtagctgcgagattttttgtaagaacggcaagattttttatagctgcgagattttttgtaagaacggtaagattttttatagctgcgagattttttgtgagaacggtacgattttttgtggctgcgagatttcttgtgagagcagtatgattttttgtggctgcgagattttttgtgagaacagaatgattttttgtgactgcgagattttttgtgagagcagtatgattttttatggctgcgagattttttgtgagtgcggtgcgactttttatgactgcgtttttttccatgaggctcttggtataaataatcctttaaaccttctttttttgcggatttcaccgcttcttcgatgtcagaatgggaatagtggcccaatttgaaatcctccttttaaaaatatgttaaggatgaagatccttactaccctcatagtacgcgcggttttaaaaagtgtataagtgttccgctgagatcttataaaaataaaagcctaaaatttgtaaggaggattatggatgaagaatcaatccaatttaccgctttatcagctgtttgttcatccaaaagacttgcgtgaattaaaaaaggatatatgggacgatgatccggtgccagctgtgatgaaggtaaatcaaaaaaggctggatattgatatcgcttatcggggatcacatatcagagacttcaaaaagaagtcataccatatttccttttatcagccgaaaacattccgcggcgcgcgagagattcacttaaatgcggagtataaagacccttccttgatgagaaacaaattgtctctggattttttctcggagctagggacactgtctccaaaggcagagtttgtgtttgtaaagatgaatgggaagaatgaaggggtttatcttgaacttgaatccgtagatgaatattatttggcgaaaaggaagctggctgatggcgcgattttttatgcggtggatgatgatgccaacttttctctgatgagcgatttagaaagggaaacgaaaacatcgctggagcttggatatgaaaagaaaacagggactgaggaggatgatttttatttacaggatatgatttttaaaattaatacggtccctaaagctcagtttaagtcagaagtgacaaaacacgtggatgtcgacaagtatttgcgctggcttgccggtattgtattcacctcgaactatgacgggtttgtccacaactacgcattatacagaagcggggaaaccggattatttgaggtgattccttgggattatgatgcgacttggggcagggatatccatggagagcggatggctgccgattatgtaagaattcaaggatttaatacactaaccgcccggatattggatgaatccgagtttcgcaagtcctacaagcgcctgttagaaaaaacgctccaatctctttttacaatagaatatatggaaccgaaaatcatggcgatgtatgaacggattaggccgtttgtcctcatggacccgtataaaaagaatgatattgagcgttttgaccgtgagccggatgtgatctgcgagtatattaaaaaccgttcacaatacctcaaagatcatttaagtattttatgaatgcgtgaaaatgggtattcgcggaaaaagcgacaattaggctattgaattagttcaacaaataaatgtgacacgtatatatgcagtatgtttatcatctatgtataagtgactaggaggaatttgaatgagcaagaggagaatgaaatatcattcaaataatgaaatatcgtattataactttttgcactcaatgaaagataaaattgttactgtatatcgtggaggtccggaatctaaaaaaggaaaattaacagctgtaaaatcagattatatagctttacaagctgaaaaaaaaataatttattatcagttggagcatgtgaaaagtattactgaggataccaataatagcaccacgacaattgagactgaggaaatgctcgatgctgatgattttcatagcttaatcggacatttaataaaccaatcagttcaatttaaccaagggggtccggaatctaaaaaaggaagattggtctggctgggagatgattacgctgcgttaaacacaaatgaggatggggtagtgtattttaatatccatcacatcaaaagtataagtaaacacgagcctgatttgaaaatagaagagcagacgccagttggagttttggaagctgatgatttaagcgaggtttttaagagtctgactcataaatgggtttcaattaatcgtggaggtccggaagccattgagggtatccttgtagataatgccgacggccattatactatagtgaaaaatcaagaggtgcttcgcatctatccttttcacataaaaagcatcagcttaggcccaaaagggtcgtacaaaaaaaaggatcaaaaaaatgaacaaagccaggaagacaataatgataaggacagcaattcgttcatttcttcaaaatcatatagctcatcaaaatcatctaaacgatcactaaaatcttcagattatcaatcatccaaatctggtcgttcgtcacgttcaaaaagttcttcaaaatcatctaaacgatcactaaaatcttcggattatcaatcatccaaatctggccgttcgtcacgttcaaaaagttcttcaaaatcatctaaacgatcattaaaatcttcagattatcaatcatcaaaatcatctaaacgatcaccaagatcatcagattatcaatcatcaagatcaccaggttattcaagttccttcaaaaattcagaaaaacaaaaggaagattatagctatgaaacgattgtcagaacgatagactatcactggaaacgtaaattttaatagataatggaggagcatcagataaagtgatgccctttttcagttaaaggaggagaatcgtgaaaggtttgaatcaattccttaacacagatgttgaggttgtcatttcaggagatacaaggtttgtcggcaccctcatagatatcggacaggatatttttgttatttttgatggctgcaattatctttatattcccttgttgcatcttcatcaaataaacaaggcgaaaatagtgaccagtactgagaagccatttttgatcaatccggaagatccaatgatagaggcagaaactcaagctttttcatatagaaatacattaaacaaggtcaaaggccagtttattgaagtttatgtaactgggggtcgatcgatccatggatatgttacaaatgttttaaacgattatattgtatttttctcacccgtatttaaaatactttttatatctatgcatcatttaaaatggtttaccccttattcaactgaacaaacaccgtatactcttgacaactcacaattgccggtcgtgccttccaaagttcctcttgtgcgtaattttgaggagcagatcaaaaaaaatattggtgaattggtcatatttgatatgggagaggtgccagaaaaagtcggactattaaagggtgtctctaataatatcattgagcttattaacgcaagtggagagccagtcatttggaagttaaatcatctaaagacaatgcatcttccctagtgtatacaaaactgccctcttgaaaagcagaaggcagtttttcgtttcatactgtgctaaagaaataaccaactgatccaaaaatataaacatgttaacgtaaaaagaacagtcagcggaatgatgataatggtcgtttttatatattcgccccatgaaatactttcatcatgctgttttaatatatgcatccaaataagcgttgctaaggttcccataggtaataataatgaaccgatatcactgccgataatatttgccaagtagatgatttttgttgttgaaggattcagggtcatttcagttaaggtaaaagtactgatcattaacgctggatggttgttaaagagattagaaaaaactgaagtagagatacctgatgcgaaagttgcatgggcgaggcttccagaaaccacaggttcaaaataattcacaagtaactctgtgaatccaatattatgcagaccataaattaagacatacatagtaaaagcgaatataaaaatgtgccaaggcgatttatataacaagtctcttggggaggttttgaaataaatccatctccagctcaacaggataaaagatccgatgacagcgactagaggaacagaaataccggtatatgatgctgcaaatagactcattctgacgagaaaaacaaatgcaagcacaaacaacatgatttttgtttgatttcgttctggtaaaggagctgatggcgaatgaagaggatggtaccttctatgccgcagagactgaaaatggctcggtatatctggcaggttcttgggaagacgtttataaaagaacataaacagtagacaagtcataaaaatgagtcccatcatactagggacaaacatcatggcagtgtgaagatatagatccattccaatgattttgagagaaattaaattaacaatattacttacgccaatcggtgcgctagaggctgtggctattaaaacaccgcttaataaatatggggctttttgatgtttttttaaacctaaatattttagtacaagcaaaaggattggagttgtgatcaaaatgctcccatcattattaaggaaaatggtcatgagaaagcagagcaaattggttagccaaaaaagcttgatgcctgaacccttggattgttggagcagttttgcagccacccaataaaagaaaccaaagctttctagtgcaatggccataatcatagtggcaaggattgtaaccgatgcacccgtgacttttgttccgatttcccctaagtctgccaatgacacacttccgcacaataaaaccattaaagcgccaaatgtggcggggatagcttcatttagtccttttggtctccagaaaataaaaatcattgttacgaaaaaagcgagcaatgtgaatatgccggtgaactcaataatttacttcacctctctatctttcatttttaaaatcaaactaatgtcctgcgcttactgatgtccttgccaactatttgtactgtatgtatacgtatactgatataaagttgtactaagcgattatattaaattaataaaaattccataagaatcccaaaagaaaaaagagattgcaagtattgttcatgtacctgcatcactctctttagttcttgtctgctgacaatttgaaatatgaataaaatgctttataagcggattatgattgtctttgcggtaagcgataacccattctgcattaagctgtatttggtccatttttcgataagtaacatccaaattaaataattttttggccgaggaaggaacaaatgtcataccaattccggcactgactaaaccaatcaccatttgatattctgtggcttcctggacaatgttgggtctgaagcccgcttgttcacagaactgaataaaatccatgtatagagtaggccatgcttctttagcaacagtaataattggttcatctcttaaatcctcaatcgtaattgattccttagaagtcaatgggtgttgcttaggcaaagctaaaacacaagggctgctttgggcggtttcgatatgtaaagctgtatgctgtaagggaggatgaagtataccaatatcaatgttgccctttagtagctcctcctgctgcctagacgaggatatttcacgcagttctattttcacagatgggaattttttacgatattcccggacaatcggcggcagaaattcatatgtagctgatccgacaaaaccgattacgagaaggccttgctcgccgcgggccgtccgctgtgccagttcaattccttgtccgatttgcatcaatgccatgcggcaatgatttaaaaagatttctcctgctgcggtaagctcgacaaatcgttttgtccttttcagaagcgtaactccgacttcttcctccagctgtttgatctgctggctgagaggaggctgcgtcatgttcagccgccgggcagcctttccgaaatgaagctcttcggctactgcgataaagtattgaagatggcgaagctccattcaatatgcattcctttccataggttaataattcgtattacatattaatcataaggcgaatcgatattggaggtcaatttccaaagagtgtatagtgaaacttatcacaagatatttaaaattttacgtttaaaatgcataataaggagtgagggtgttgacaaaagcaacaaaagaacaaaaatcccttgtgaaaaacagaggggcggagcttgttgttgattgcttagtggagcaaggtgtcacacatgtatttggcattccaggtgcaaaaattgatgcggtatttgacgctttacaagataaaggacctgaaattatcgttgcccggcacgaacaaaacgcagcattcatggcccaagcagtcggccgtttaactggaaaaccgggagtcgtgttagtcacatcaggaccgggtgcctctaacttggcaacaggcctgctgacagcgaacactgaaggagaccctgtcgttgcgcttgctggaaacgtgatccgtgcagatcgtttaaaacggacacatcaatctttggataatgcggcgctattccagccgattacaaaatacagtgtagaagttcaagatgtaaaaaatataccggaagctgttacaaatgcatttaggatagcgtcagcagggcaggctggggccgcttttgtgagctttccgcaagatgttgtgaatgaagtcacaaatacgaaaaacgtgcgtgctgttgcagcgccaaaactcggtcctgcagcagatgatgcaatcagtgcggccatagcaaaaatccaaacagcaaaacttcctgtcgttttggtcggcatgaaaggcggaagaccggaagcaattaaagcggttcgcaagcttttgaaaaaggttcagcttccatttgttgaaacatatcaagctgccggtaccctttctagagatttagaggatcaatattttggccgtatcggtttgttccgcaaccagcctggcgatttactgctagagcaggcagatgttgttctgacgatcggctatgacccgattgaatatgatccgaaattctggaatatcaatggagaccggacaattatccatttagacgagattatcgctgacattgatcatgcttaccagcctgatcttgaattgatcggtgacattccgtccacgatcaatcatatcgaacacgatgctgtgaaagtggaatttgcagagcgtgagcagaaaatcctttctgatttaaaacaatatatgcatgaaggtgagcaggtgcctgcagattggaaatcagacagagcgcaccctcttgaaatcgttaaagagttgcgtaatgcagtcgatgatcatgttacagtaacttgcgatatcggttcgcacgccatttggatgtcacgttatttccgcagctacgagccgttaacattaatgatcagtaacggtatgcaaacactcggcgttgcgcttccttgggcaatcggcgcttcattggtgaaaccgggagaaaaagtggtttctgtctctggtgacggcggtttcttattctcagcaatggaattagagacagcggttcgactaaaagcaccaattgtacacattgtatggaacgacagcacatatgacatggttgcattccagcaattgaaaaaatataaccgtacatctgcggtcgatttcggaaatatcgatatcgtgaaatatgcggaaagcttcggagcaactggcttgcgcgtagaatcaccagaccagctggcagatgttctgcgtcaaggcatgaacgctgaaggtcctgtcatcatcgatgtcccggttgactacagtgataacattaatttagcaagtgacaagcttccgaaagaattcggggaactcatgaaaacgaaagctctctagcactctgcgcatcacgacactgttttatgaacagcactaaataaaaggagtgaagggaaatatgaaacgagaaagcaacattcaagtgctcagccgcggtcaaaaagatcagcctgtgagccagatttatcaagtatcaacaatgacttctctattagacggagtatatgacggagattttgaactgtcagagattccgaaatatggagacttcggtatcggaacctttaacaagcttgacggagagctgattgggtttgacggcgaattttaccgtctccgttcagacggaactgcgacaccggtccaaaacggggatcgttctccgttctgttcatttacgttctttacaccggacatgacgcacaaaattgatgcgaaaatgacacgcgaagactttgaaaaagagatcaacagcatgctgccaagcagaaacttattttatgcaattcgtattgacggattgtttaaaaaggtgcagacaagaacggtagaacttcaagaaaaaccttacgtgccaatggttgaagcggtcaaaacacagccgattttcaactttgacaacgtgagaggaacgatcgtaggtttcttgacaccagcttacgcaaacggaatcgccgtttctggctatcacctgcacttcattgacgaaggacgcaattcaggcggacacgtttttgactatgtgcttgaggattgcacggttacgatttctcaaaaaatgaacatgaatctcagacttccgaacacagcggatttctttaatgcgaatctggataaccctgattttgcgagagatatcgaaacaactgagggaagccctgaataaaagaaaaaaagaaagccccttttagcagggctttctttttatttggctcttttcctgattttagataaaataacatcaaaacagtaaaggtgtggtctgatgaaaatattggttttggcagtgcatcctcatatggagacctcagttgttaataaggcgtgggctgaggaattgagtaaacatgacaatatcacagtacgggatctttataaggaatacccggatgaagcgatagatgttgcgaaggaacagcagctgtgcgaggaatacgatcggattgtctttcaattcccgctatattggtacagctctccgccgctcttgaaaaaatggcaggatcttgtgctgacttacggctgggcttttggttcagaaggaaatgccttgcatggcaaggagctgatgctggctgtatcaacagggagcgaagcggaaaaatatcaagcgggcggagcaaatcattactcgatcagtgagctattgaaaccatttcaggccacgagtaatctgatcggcatgaagtatctgcctccatatgtgttctatggcgtgaattatgcagctgcagaggatatttctcacagtgcaaaacggttagccgaatacatccagcagccttttgtttaaaatacagccctgtccaacatacggcagggctgtatttgtttaaaaatccggcagttcagacaggttattttccttgatgccgtccggttcacttcgcaaaatgtcacgcccgtatttatggaagacatcaacatgagcgagttttcctgattttgcttctgacagcgcagtagggtagtcgagctctcttcctgtattggttttcactgcgataatattgtcttcctcatttcttctaaccgcaataatttcttcttttccagatggaacattttcttgatcgacagttgtttgccgggctttatacgattcatatgctgcttcaaattgatccatatttacacctccgctttttagcgtgaacaaaaatgtcgatgatcatgtaaggtttcgacacagcatacgacaatatttcctgagaaatatcttgggaatgtgacaaatcaattcataataaaagggattccgcataaatgcggaatccctctcagttattttgtcatgtgtaaatcctttgttttcatataacctgtcgcaccgccgtaatcaacgaatacccaatcaaaatcaaaaccgcctttattcgttttactccagcctaaaaaagaaacgcttgtgtctgctggaagagtcttaatgctctttccatcagcggaagtatatacttttgtttttgttttggtttttaccgttgtcgctgcttttacaatgtaatgagtggagacaaatcctatttttccgtttttatactgaacctttgcccagtcagcatttgagaaggaaatcagctttaagctatctcctaggtgcagcgtatcggctttttggcttgatgcggaaggcttcgttctgacatttagagcctctgctgataccaaataagaatcaatcggataactgtataaatcatcaatgcttaccgttgtttctggctgttgggcatggatcgttccagcgccgccagcagccgccgcagtcattccagccgcaagtgctaatgttgaaaatagttttgttggtttgttcatgccgttcctctcctcacgtaagagaaataattcgttctatatctctattcacgttatcgcaggttcctaaacatcagacaattatttttgtgtttctagtttgagaggcgcggatattgttttttgcactttttttccgtgcaaaatatcatctgctgcttctgtagccaatttaccgattaattcaggctgctgagcgacggtggctgacagctttccgtctttaatggaagcgagcgcatctttattgccgtcaaaaccgatcaccaatatgtctttccccgagctgttaattgcctcgagagcaccgagcgccatttcatcgttgtgagcaaaaacagcttggatatcaggatgtccctgcagcaggttttccatgacagtcaggcctttcgtgcggtcaaagtcagctgattgttttgtgacaacatggagcttttggtctgcgatgttatggaatcctgagccgcgttcccgtgtggcagatgcgccggggacgccttcaagctctgccacctttgctccttttccaagtttgtcggcaataaacgccgcggccatttcaccgccttttacattatcggaagcaacgagggtttcaacttttccttgttcggcagatcgatcgattgttacgacgggcacaccgactgcgtttgcagattctactgccgttgagatcgccgaagaatcagtcgggttgattaataatgcatcaacaccttgctgaattaaatcttccacgtcactcgtctgtttcgatgaatcattttgtgcatcaacaatgattactttcattccccgttttttagcttctttttcgatacccttttttaatgagacaaaaaaaggattattaagcgttgagacggacaagccaatggtgaattcctttttgttccccgagtttgacggctttgcccattggggaggctcaagcgaacaggcagttaacaaaaataatgataacgttaaaatgacggatacagcctttttcatgtgaaaaccctcctaagctgacttcttgcggtctaacaataccgcaattaagataacaatccctttgacaaccagctgataaaatgatgagacgccaagcagattaagtccgttattaagtgtgccgatgatcagcaccccgattaacgtgccgacaatgcgtcctcggccgccagaaagacttgttcctcctaagacgactgccgcgatagcatcaagttcgtacgattcccccgcagtcggctgggccgaatgcaggcgggaagtcaatatggcacctgcaagagcggataaaagcccggctaaagaatagatcatcactttcacgcgcgtcactttgatgcctgaaatgagcgcggctttttcgttgccgccgatagcgtacgttcggcgtccgaatggtgttttatgaagaagcacccaaaggatgacaaaggcaagaaccatcgtaattgccggtacaggaatgcctaaaaagtaaccgcgtccgaacatctgaaaagcgtagtttgtgccaagtccggtaatcggatttccatctgtatacactagcgtcagtccgcgaaacacagtcatggtcgcaagcgtggcgataaagggcgccatttttcctttagtaatcaataatccgttgatcatgcctagtacggcaccaatgatacagccaaggatgatcgcgagaaccggatcgacaccggacacaatcacccccgcaactaaagcactggacagggcaagaatagcgccaacagaaagatcaatgccgcctgtcaaaatgacaaaggtcatcccgaacgcgattaatccgttaatggcgacctggcgaagcaggtttaaaatattcagcggttcaagaaagcttggatttaaaatagatacaatgataacgagaataaataaaccaagaaacgggccgagtttttgcatgactccgtcgaagtgaatccgtttttgttctgtttgcagttgttccgttttcatattaccgccctcccgtggcaagtgtcataattcgttcttgtgttgcttctcgcgcatggatctctccgctgattctgccttcatggacaacgataatccgatcgctcattcccagaatttcaggaagctctgatgacaccatgatgatagcgacgccgcgttcggtcagctcattcatcagcgtataaatctctcgtttggcgccaacatccacacctctggttggctcatccaagataagcactttcggtccgatgccgatccacttggctatcaccactttttgctggtttcctcctgataaatggcgtgcgtgcgtttccggtgatgctgttttgatagtgaggcgcttgattaacagatcgacaaattcagcctcccgcttatgatcaatgagaccctttggtgagaagctggacagattgggcagggcaatattttcgcggatcgaggtgtcgagcaggagcccttcatccttgcgattctctgtaataaagccgagaccttttttcacggcttcctgcgggttcttaatagccgtttttttcccagcgatccatatctcacccgtgtccagcctgtcaacgccgaacagcgctctcatcatttctgtccggccggctcccattaatcctgaaacaccgacgatctcaccggaacgcacataaaagctgacgtcctcaaaactcccttttacggaagcatttttcacctcgaatactttgtcaccgagagaaggagtgcgctttggatatcgttcagtcagctcccgtccgaccatttttttgacgacttcatcaaaatcagtttctgagatgtttgttgtatctaccgtttttccgtcacgcatgatggtaattctgtcgcaaatcgcaaaaatttcttccatgcgatgcgaaatatagacaatggagacgccgttcttttttaacgctgtaatgacctcgaagagcttgctgatttcacgttcagtcaacgctgcggtcggttcgtccataatgatgacctcggcatttgtcataagcgcttttgcgatttcgatcatttgctgctgtccgacggaacattcgccggcttcttgatcaagagaaagagagacggagagtttgtcaaattgctcttttgctagcgctttcatttttcttgtttgtaagacgcccagcttggaggatatctctttaccgataaatagattctcaagaacggtcatttccggccagatattcaattcctgatggataaaggctattccatgctgttccgcttctttcggattggaaaaatacgtttcgtttccgtttatgctgatttgacctttatctgctttgtgcaggcctgtcaaaatgttcataagcgtggacttgccggcgccgttttctcccattaatgcgtgaacctcgccaggcatgagctgaaaggaaacgcctgacagcacctgattttttccgaatgttttatgaatgtctttcatttcaatctgcatgtttcatcttcctttctagaaaagtacacctgcctgcaggatgcagttggcatatggtgtgaattctcctgttcttatgactgcctttgcatcttttgtcagcagcttaaactcctcgtgagaaaggtattcaatctcttgttcagagaaaagattttctagaaatttcgcattctcctgattggatgcttttatttcagctgcagcaatgactttttcgaccgccatttcctcagccagtactgccgctgtatcttggaaagccggaaggcccggcttcagtgaaagatcaattttcaaaacgccgtcaggaaccggcagtccggcatccgcgatgacaattttatcagtgtggccaaggtcggctaaaatcttggcaagatggctgttcagtataccgtgttttttcatgacagcagctcctctacttcatttcttgtcggcattccgccttgggcaccgaaggagcagacagaaagggaagcggcacgattggcaaaccgcaatgcggcttcaatgtcttttccctcagccagggccacggcaaatgctgcgttaaacgtatcaccggctccggttgtatcaacgggttctacagggaaggacgggatgagcacctctttgctgccagccgaatagcggacgccttgttttccttccgtaataaagagctttgccggataaagcgccagagcttcggaaatggtaagctcagggaataaaatcgaagcctcgtgttcattcggcgtcagataggtagcgtgatcaattgtttcctgcttgagcgggcgggccggtgctgggtttagtatgatcgggatatcgtgagaatggcagtatttgcacacctcatcaaccgtttcttctgggatttcctgctgaatcagcaccatatcgaccttttcaatctgttcgagcgcgtttaacgcatacgctggggtgatgtcatcgttcgcgcctttgacaacgacaatgctgttgtcgccttcagcaagcacaatatgagcggttccgctttccgtatgtgtaaccggttccatataatcagtgcgaacgccgttagctttgagattattcaaaatagctgttccataatgatcgtctccaactttgccgaccataaacacttgcgccccaagtctggctgcggcaacggcctgatttgctcctttgccgcccggcacagtctgaaatgacgtgccaagaaccgtttcaccggcttttgggcgtttgtccgaggtgaccactaaatccatagaacagctaccaatcacacaaatattacgcatcttaatcttcctttcttgtcgtctttcttcctatataggtgacaggcatttgaattgccgtttctgccagcggctgttttttgatgatacccaaaagcagtttggcagcttctctccccatatcatatgcgggctgtttaattgtagaaagtggcgggaacagaagtccgctttgcggaatgtcatcatagccgataatttgaatgtcctccggcacgttttttccgcgccgcaatgcttcatgtaaaacggcagcggcttgaatatcattactcgcgatcacaccatctgtcgctggataagcggcaaacagctccttcgccatcgattgtgcatctttaattgaaaatgaagctgtctcaatgacctgaaaatcaacttcagcctgctttaagatttccaaagcgccgttaaatcggtcttgagcggtcggcaggtgagcaggtcctctcaagagcgtaatgcgctggctttttccgtgaatgatagcctgagcggctaactttcctcctgtatagccgtcactggacacagaaggagccccttcaagtgttctgtccagaaaaacaactggataattcatgccgctgtattcctcgagatccgggtaatttgttgcggcaataatgcctgcgacatgattttgcttaaaggtttgaaggtattcaagttcttttttcaattcctcgtcactgttgccgaaaataaggcgatagccttcccggttcaattcatcctccgcaccgcgggcaagctgggggaagaaagggtttgtgatatccgggagcaaaagtccgatcagtcgggattctcttttatatagagatctggcgacttcattcgggtaatagttcagcttcgccatcgccgctatgacacgcgttcgcgtttcttcgtgtacatagccattatcattcaggacgcgggaaaccgtcgcaactgaaacgcccgccgctccggcgacatctttaattgtagccaaaacagctcctccttgtttatgtaaccgtttacacagatagattatcatgaacaatccgaagttagcaataaaaatatcaaaagaaatctacttgtaaattgtatataaaattgaaaaatttaaggttttcactctttttttgacaaagtcttcacaaatatggatgaagatttcttgaacaaatattaagttttattaaaattgtttcaaagtcatgcgtttagacctgtaaatggtgagaaacagaaaagactatcatcccagaaaatgtttaattatgttagagaattcggactcgtatgtttagcgttttcatctcgaacctccttagtcattttggaatgggcctcatattgcttattccatgcagaaaggatgacattatgaccttgtccttaagaaacaggataaaactattttgtgttcataagaaccggaaacacgcatgatagcaggagatacttgataacacaggctgaaaaaaagattgatttgaaatgcatattaaacacaaacaccagggtgtgactatacgtccagaaggatatcaggggaaaaatgaaagcgcattctcttcgatttttaaaaaaagtgatgaggtataagtcctgctgttttccaaaaatagaaaacagtttgtaggtataaaatctctttcaaaagagaagtttggcttagtcgattagggaagattatgttacataatgccgattgagaattcatagtgattctatatactgatgaatgaatttacaacaatatagaaggagatgtcgaaaagcaatgtggttactcattatagcctgtgctgtcatactggtcatcggaatattagaaaaacgacgacatcagaaaaacattgatgccctccctgttcgggtgaatattaacggcatccgcggaaaatcgactgtgacaaggctgacaaccggaatattaatagaagccggttacaagactgttggaaaaacaacaggaacagatgcaagaatgatttactgggacacaccggaggaaaagccgattaaacggaaacctcaggggccgaatatcggagagcaaaaagaagtcatgagagaaacagtagaaagaggggctaacgcgattgtcagtgaatgcatggctgttaacccagattatcaaatcatctttcaggaagaacttctgcaggccaatatcggcgtcattgtgaatgttttagaagaccatatggatgtcatggggccgacgcttgatgaaattgcagaagcgtttaccgctacaattccttataatggccatcttgtcattacagatagtgaatataccgagttctttaaacaaaaagcaaaagaacgaaacacaaaagtcatcattgctgataactcaaaaattacagatgagtatttacgtaaatttgaatacatggtattccctgataacgcttctctggcgctgggtgtggctcaagcactcggcattgacgaagaaacagcatttaagggaatgctgaatgcgccgccagatccgggagcaatgagaattcttccgctgatcagtccgagcgagcctgggcactttgttaatgggtttgccgcaaacgacgcttcttctactttgaatatatggaaacgtgtaaaagaaatcggttacccgaccgatgatccgatcatcatcatgaactgccgcgcagaccgtgtcgatcggacacagcaattcgcaaatgacgtattgccttatattgaagcaagtgaactgatcttaatcggtgaaacaacagaaccgatcgtaaaagcctacgaagaaggcaaaattcctgcagacaaactgcatgatctagagtataagtcaacagatgaaattatggaattgttaaagaaaagaatgcacaaccgtgtcatatatggcgtcggcaatattcatggtgccgcagagcctttaattgaaaaaatccacgaatacaaggttaagcagctcgtaagctagggggaaatgcaaacatgttcggatcagatttatacatcgcactaattttaggtgtactactcagtttaatttttgcggaaaaaacagggatcgtgccggcaggacttgttgtaccgggatatttaggacttgtgtttaatcagccggtctttattttacttgttttgctagtgagcttgctcacttatgttattgtgaaatacggtttatccaaatttatgattttgtacggacgcagaaaattcgctgccatgctgataacagggatcgtcctaaaaatcgcgtttgattttctatacccgattgtaccatttgaaatcgcagaatttcgaggaatcggcatcatcgtgccaggtttaattgccaataccattcagaaacaaggtttaaccattacgttcggaagcacgctgctattgagcggagcgacctttgctatcatgtttgtttactacttaatttaatgtaaggtgtgtcaaacgatgaaaaaagaactgagctttcatgaaaagctgctaaagctgacaaaacagcaaaaaaagaaaaccaataagcacgtatttattgccattccgatcgtttttgtccttatgttcgctttcatgtgggcgggaaaagcggaaacgccgaaggtcaaaacgtattctgacgacgtactctcagcctcatttgtaggcgatattatgatgggacgctatgttgaaaaagtaacggagcaaaaaggggcagacagtatttttcaatatgttgaaccgatctttagagcctcggattatgtagcaggaaactttgaaaacccggtaacctatcaaaagaattataaacaagcagataaagagattcatctgcagacgaataaggaatcagtgaaagtcttgaaggatatgaatttcacggttctcaacagcgcaaacaaccacgcaatggattacggcgttcagggcatgaaagatacgcttggagaatttgcgaagcaaaatcttgatatcgttggagcgggatacagcttaagtgatgcgaaaaagaaaatttcgtaccagaaagtcaacggggtaacgattgcgacgcttggctttaccgatgtgtccgggaaagatttcgcggctaaaaagaatacgccgggcgtgctgcccgcagatcctgaaatcttcatccctatgatttcagaagcgaaaaaacatgcggacatcgttgttgtgcagtcacactggggccaagagtatgacaatgatccaaacgaccgccagcgccagcttgcaagagccatgtctgatgcgggagctgacatcatcgtcggccatcacccgcacgtcttagaaccgattgaagtatataacggaaccgtcattttctacagtctcggcaactttgtctttgaccagggctggacgagaacaagagacagtgcactggttcagtatcacctgaagaaaaatggaacaggccgctttgaagtgacaccgatcgacatccatgaagcgacacctgcgcctgtgaaaaaagacagccttaaacagaaaaccattattcgcgaactgacgaaagactctaatttcgcttggaaagtagaagacggaaaactgacgtttgatattgatcatagtgacaaactaaaatctaaataatcggagtgataaagatgaaatttgtcaaagccatctggccgtttgttgccgtagccatcgtgttcatgtttatgtcagcttttaaattcaatgatcagctgacagatcaggaaaaacagaagattgatatggaaatgaataaaatccagcagcaggaagaaccggtaaacgccaataaataattcaaaaaagagagtgtctgatgagacactctctttttatttgcccagcatattcattctgtaaaaatattaaaaagtctcttaacatattcaaaaaaataccgatgttaaaactgcaaaaagaggaggagataataaaagtgaacacactggcaaactggaagaagtttttgcttgtggcggttatcatttgttttttggttccaattatgacaaaagcggagattgcggaagctgatacatcatcagaattgattgtcagcgaagcaaaaaacctgcttggatatcagtataaatatggcggggaaacgccgaaagagggtttcgatccatcaggattgatacaatatgtgttcagtaaggctgatattcatctgccgagatctgtaaacgaccagtataaaatcggaacagctgtaaaaccggaaaacctgaagccgggtgatattttgtttttcaagaaagagggaagcaccggcactgttccgacacatgacgccctttatatcggagacggccaaatggttcacagtacacagtcaaaaggggttatcatcaccaattacaaaaaaagcagctattggagcggaacttatatcggggcgagacgaatcgctgccgatccggcaacggctgatgttcctgtcgttcaggaggccgaaaaatatatcggtgtcccatatgtgtttggcggaagcacgccgtcagagggctttgattgctcggggcttgtgcaatatgtgtttcaacaggcactcggcatttatctgccgcgatcagccgaacagcagtgggcagtgggcgagaaggtagcccctcagaacataaagcctggtgatgtcgtctatttcagcaatacgtataaaacgggaatttcacatgcaggcatttatgcgggcgcaggcaggttcattcaggcaagccggtcagaaaaagtaaccatttcctatttgtcagaggattactggaaatcgaagatgacgggtattcgccgatttgacaacctgacaatcccgaaagaaaatccgattgtttccgaagcgacgctttatgtcggagaagtgccttacaaacagggcggagtaacacctgagacgggatttgatacagctggatttgtccaatatgtataccagaaagcagccggtatttccctgcctcgatacgcaacaagccagtacaatgccggaactaagattgagaaggcggacctgaagccgggagacattgtgttctttcaatcaacaagcttaaatccctccatctatatcggaaacggacaagttgttcatgtcacattatcaaacggcgtgaccattaccaatatgaacacgagcacatattggaaggataaatacgcaggaagtatacgggtgcaataaaagaaaaagactccaatctctggagtcttttctttatgcatattgccccgaaagaagctggtctataaagtaggccacaccattttcgtcattgctttttgtgacaaaggtgcttttttcttttaattcatcaatcgcattttccatggcgatacggtgtccggcgacttcaaacatggacaaatcgtttggactatcgccgatcgcatagatatcctgtgtttcaattccgtatatgtcagccagctttgttaacgcgcgtccttttcctgacgaggccggcaggatttcgataatatgttttcctgaagaggtttgcgccagttttttatgatgcttcagttcttccttcgcttgtttcagcttgtccatatcaaaggagaagcaaagaagcttataaatgttttcaccgccgtcaaaaaccgattcgatatgagggattggtttaatgccaaactgtttgaattgagtcatggctccttgccacaagtcatccgtctgctcgtttgggtttgcgctctttagaatgtcaagctccgcgtgcagcttagcttcgccgtcaaaaggagaaagcagatggtcatctgtatatacctcaaagtaaatgttttttgaaagtaagtaatcagcaatcgctttaccggcttcctgatccattaatgtccggctgatcaaacggtaacccgtgtcgtggatcgtaccgccattagctgcaatgatagggatgtccaagtcatccagcagcgcttttacatcaaatgtcgctcttcccgtgcaaatggtgacgaggatgccggcatcaacggcccgcttgatcgcctctctgttttccgcagaaatgacgctttctttattcagtaatgttccgtctagatcaatcgcaatacatttcatatgtaggggaacctccttaaaaatgaagctgcttcgtgtagtatgttcagcttgcctgtgaaacataatccatataaattaaggctaaacgttactttgataattttcaacaaggaaatatgtaaaacgggatggcgtaatcgccatcccgttcattatacacctaaatcgttttgcagctcttttttaacttcctgcagcttttgctgattcaatttgaaataatagactccggcaggttcataatcataacccgtcagctgaatagactcaactgatttcaatgaagtgatgaacgggaacaggccgatggcatctttaagagataagttcatttttaaattttgccccatcgtatccacaatatcatcataagccggaattgagctcaatgattttgatttatctataatggcgctcagcacttccatttgtctttgcccgcgtaaaaggtcactgtccgctttacgtgttcttacgtaagcgagcgcttcttccccatcaagcgtatgtgttcctttttgaagaacgactttaccttttgtatcttttttgatttgctgaatgactttatcgctttttacagttactttgacgccatttaactcgtttacgacgtcttcaaaagccgtgaaattgctttctacgacataatcgactggaatatccagcatttcttcaactgttttcacagttaagtcaacgccgccgtaagcgtgagcatgtgtgaatttatcatacccgtggcctgggatgtttacataggcgtcacgcggaatgctcagcattttagctgttttttctttccgattaaatgtaaccagcacattcgcgtcacttcttgcctgatcgacggtctcgccgtttttctccctggcatcaattcctaagagcaatacagaaaaagaatcttttccaggatcaaattctttgatccgttttacagattgttctccgcgtgcaaggctgacatgagcttccttagaagcattgttcagctttacaaaagcataggcgccgacagagcctgccgcaatgactaaaaaagccattaatccggcaacaactttcacccatttttttagttttctttttttctttctgcgctgtgatcgttcttccatatatcaatacctcacgtttctttaatatttgaagcgtaccattctatttgccatggggcaactactcgaaagacatttttcgataaatattcctatatttataagttcttgtttttgaaaattgataacgataatgtactgaatcaccttatattggacgccgcagcaggtaaaatgtttcggcgacattgaaaaaaatacaagtaaatgattggaaaacttatgatcagaaaaataaaaaggtttaatggccggaaaaagaggctaaaagatttctaaaaaaatcccacagacaatgtcattgcagctgatggagaaagggagtcatctttatgaaaaagcagtcaaatatatggctttattttttcggagctcttggaggcgcgttatatggctatgataccggagtgatttccggagctattttatttatgaaaaaggagttaggcttaaacgcgtttacagaaggtcttgttgtcagctccttgctggttggggcgatattgggctcaggagcggccggcaagctgactgaccgtttcggaagaaaaaaagcaattatggcagccgcgctgctgttttgtataggcggtcttggtgtggcactggccccaaatacaggagtcatggtgctgtttcgcatcattttgggacttgcagtcggaacatcgacgacaatcgtacccctttatttatctgaactggcgccaaaacataaacgcggggcgctgtcatcactgaatcagctgatgatcacggtcggcatccttctttcttacattgtcaattacatatttgccgatgccgaagcgtggcgctggatgcttggattggctgctgtgccgtcattgctcttgcttattggcattttgtttatgccggagagcccgcgctggctgttcacgaatggcgaagaaagcaaagcgaagaaaattcttgaaaaattgcgtggcacaaaagatattgatcaggaaatacatgatataaaagaagcggaaaagcaggatgaaggcggtctgaaggagctgttcgatccatgggtgcgcccagcgcttattgcaggtttgggactcgcttttttgcagcaatttatcggaacgaatacgatcatctactatgcgccaaagacctttacaaacgtcggattcggaaactccgcttcgattttaggcacggtcggaatcggcacagtcaatgttctcatgacattagtagcgattaaaatcatcgacaagattggaagaaagccgttactgctattcgggaatgcgggcatggtgatcagcttgatcgttctcgctttagtaaatctctttttcgataacactccggctgcctcatggacgaccgtcatttgtttaggcgtgtttatcgttgtctttgcggtcagctggggaccggttgtgtgggtgatgcttcctgaattgttcccgcttcacgtcagaggaatcgggaccggtgtttcgaccttaatgttgcacgttgggacactgattgtttcattaacctatccaatattaatggaagcgatcggaatcagttatttattcctgatttatgccgcgatcggtatcatggcgttcttatttgtccgatttaaagtgacagagacaaagggaagaagccttgaagaaattgagcaggatttacgggacaaaaacggacagggaggagcggccggaaaacagcagactgtcggaacataaaaaagggtgcgcgatcatgcgcacccttttgattgcttactttcccaccgtgccaaagttaatgattttaaaagaaatatcgtacttaaaatcagcctcagaaaatatttcatcccaatgcccttttactttattccaatagtcagggtgttgaatccttatgtggtctgataaaaagaccggatcggttttatactcgtgctgcagtttatccatcacctgctttacgtctcgttcaagctttttctcaaaaatgttctccagcctgtgcaaatatcttttgctaaaggagttttcattcgggttttggtcttctgtcaggatgcccttcgttttaacagaaatctgaaagacaggctttccgttttcaatgacgggtttaattttcgttttcgactttttaatttcaaacgtaatcggatgtcctttatctgtcgttggcatgacaccgccttggatcgtccccatgacccatgtcagtgtctgggtttcatcagctgaaagaaacccaacgagtttattgctgcctcttttgataacgcctgaaccgtcatacttggcttttcccttttggtttttcacggcttgaataagataactgtacccgttctgagagtatatagatgctctgccgatacgcagcggtatcataatcttaccgttatatccgctgtgagttgtcaaatcaatcagtttttctgagggcatcggctgctgctgattggggtttccttttgtgaaaacatcagctgcattccctcgggctgccatcaaatagctacttcgccgcagctcatcatcccggataaagtggttgaagacttggtctacattttgattcctcatcagtttttctcccaaaagaatcacttttaaatgatcgctataaacaggagggtccttgatggatacgtcactgactgcttccaggatcgttttcccgtaggacgtcacattgacaaattcgggttttccggatgcttggctgtcttcgctttggggaagaaggttttgatatgtcagtttgtactggtgatcatctgtctcatcgatcgccagccctctggcgaaggatagtttctcaatatttttgacatcccagcacccgcagagaacctgcagcataagaaacatgactgcgagttttgttgctgttttcattgcagctgacccctcccaagttttttctgtacccagcttaaaagccagacgaagaatggaattgcaatcacaattaagaaagcatatccaagaagcgtcccgtaataaaacacgtcattcaagtccttgggatacatcgttatgaaaaacgtcgcaaccagcattgcagtcagcagccaagcattgtttttattttttagatgaaagatttccgttaacccgatatgggcgcctttgaaggatccgagcatacaggtaaattgctgagcagtccaggtcagctgtaaaaacagatcaaatcgttcaataaagatacccggaacctctaatgcgtggatgagggaaatggtcggccatgtcaccgtttttgcctcagccacagtcatacagccaatcacaatgaacaaagtaatgctgtagaacactgtagaagtcccgatcccaaaagcaacagcctttttcgcttgcttcggatctctcataaatgggacgagataaaagatgatttcaaatcctgagaaatataaaagtgtttttgggaataaagagaaaaaactttgatagcctccctcaaaaacaggccggataaaatcgaactggaacaagcgaaagctgaacatcagaagcatcataaaaataataagggttatagggaaaatataagcgtatacctttgcaattgaataaacgcctccacccacatgatagatggcaactgcaagaaatataaacaccacaactgccattggcgtgtttttcaacaaaaagaatccgacaacctctcccaaaatccgagcttgatagcaaacaatcccaatgaaatatagacagatatataaattcaatagaaagccgatgaatgttccagctacaatgttgttgagcttaaaaagagttttttcgctgtttttttgaaggaaaggcaaaaaaagcagaacaatgataataaaaataacgccctgcagcagtatcataagccatccgctcggactgccggtttcggcagctgagcggggaagggttaggaccccggcaccgatcagtgtgctgctgatcataatgagcgtctgcataaatgtcagtttatgctctgatttcctcatagccatcacctttgtctgatgttatcttcaggatcgtttcgtgtcggtcttctttttaaaaatatagtaggaatgcggatcaccgtgtcttttaaatctcgtccaggaattgctaaaatcggaataatataatcctgtccgaagcttttcaggcgcataagatggccgatcacaaacagataaaccattataacgccatacatgccaagcgctgttgcacttatcataaccccgatccgaatgatccgcagcggaaagttataggcgtatgaaggaacggtaaaggatgccagtgctgtgacagaaacgacaatgaccataagcgcactgacaatttgtgcctgaacagctgcctgtccgatgacgaccccgccgataaggccaattgtctgtccaatcggcttaggcagccttaatccggcttctcgaatcaattcgatcgtaaagatcatgataaaggcctctataaaaggcgggaacggtacgttaagcctgctgcctgcaatggaaatggccattctagtcggcaatagcccggtgtgaaaagaaacgagagaaatatacagaccgggcaaataaatggtgatcaggatgctggaataacgaagaaggcgtacaagtgacattgggatccagcgctggctgtaatcatcgggcgaatgaataaattcgtcaaccgtagccggtacaatcaaagcaaacggcgtaccatccactaatatggacactcgcccttctaacagtgcagcctctacacgatctggccgttctgtgcttaatattgtggggaaaattgaaaatggttcgtcttcaatcagctgttcaagcgtccccgattccggcaaattatctatattgactgatttcagccttttaaacacttctttgacgacataatctggggcgatatcctgaatataagcgacagcgattttctttttggtcctttttccgagtgtcatttctttgatgacgagattaggatcactcgtccgttcacgtaaaagcgccgtgtttgtccgcagtttttcaataaatcctattttagggccgcgttccacgacttcggaggagggttcatcaagactgcgtgttgcgactgactttgtgtcgaaagctaatcccccgcgatagccatcagcgagcaaaatggcttgccctgaaaaaacgagctgctctatttctttcattgtagaaacaacgctgtggtgaaagccgaaaaaaaaggcggataagtcttcaatcgagctttccttatgggctaacgcctctttttgtaaaggagaaatgacgtattgcgccagcattttattctctgtcagaccgtcaatatacagtaaacacgccttttgtctgctatctccgaaagcaaatgtataaaacatcatatcgtcgttttgtcccaatgtttttttcagtgtgtctaaattgttctggagatcagagtcgatttgcatagtttctctccttcgtaaacagattgacggtttttattaatttgtatcaaaaaaggagaattattcttatcaaggaaaaggctgaaacaaagcttcttttcgacgtgatataatagataggaagcgttttctttgaaggggtaatgaaaagatgatgctttgtacatatgttgtcatcggaaaaagacagcttatacgggcgtttgtaagaggggcgcaccgggaaaatgatgatcagttatttacaggggaggggtacggatcatgacgcaatcaccgatttttctaacgcctgtgtttaaagaaaaaatctggggcggaaccgctttacgagatagatttggatacagtattccttcagaaacaacgggggaatgctgggccatttccgctcatccaaaaggaccgagcactgttgcaaatggcccgtataaaggaaagacattgatcgagctttgggaagagcaccgtgaagtattcggcggcgtagagggggatcggttcccgcttctgacaaagctgctggatgtgaaggaagatacgtcaattaaagttcaccctgatgattactatgccggagaaaacgaagagggagaactcggcaagacggaatgctggtacattatcgactgtaaggaaaacgcagaaatcatttacgggcatacggcccgctcaaaaaccgaacttgtcacaatgatcaacagcggtgactgggagggcctgctgcgaagaatcaaaattaaaccgggtgatttctattatgtgccgagcggaacgcttcatgcattgtgcaagggggcccttgttttagagactcagcaaaattcagatgccacataccgggtgtacgattatgaccgggttgatgacaacgggaagccaagagagcttcattttgccaaagcggtcaatgccgccacagttccccatgtggacgggtatatagatgaatccacagaatcaagaaaaggaataaccattaaaacatttgtccaaggggaatatttttcggtgtataaatgggacatcaatggcgaagctgaaatggctcaggatgaatcctttctgatttgcagcgtgatagaaggaagcggtttgctcatgtatgaggacaaaacatgtccgctcaaaaaaggcgatcactttattttgccggctcacatgcccgattttacgataaaaggaacttgtacccttatcgtgtctcatatttaaacttaatctcacttcgagattaagttttttttattagaaaatggaagtgattcacctataaatgaagcatgcgcgtgccgataaataaactagttttatatactcatagaataagaaagaggagaaggaatgaaaaagagactaatcgcacctatgcttctatccgccgcgtcccttgccttttttgccatgtctggttctgcccaggcagccgcgtataccgactactcactatataaagtagagccgtcgaatacgttcagtacagaaagccaagcctcacaagctgtcgccaaactggaaaaagatactggctgggatgcatcctaccaggcttcaggcacaacaacgacctaccaaatttccgcctcaggctttcatagcgaatcagaagcgaaagcaatactgagcggactcgccaaacagacatcgattacaggaacgtcaagtcctgttggaagcaaacagccatatgtcaccatctcgtcaggtgccatctccggagaaaaacaggtcaacactatgctagcaaagctgaaacaggagacgggagtggctggcgctgtaaaagcttacggagcagctcagccctatatgaacgtcatgacatcagacattgctgatgagacaaaagtcaaggcgcttatccagagcctggctaagcaaacggggattaaaagctcgtatcagcccatcacacacacggtgtctgtcacaaccattcagtctggcacaatcgttggagacagcagagcagcgcagatcaaaaacgccttccaaaaggaatcggggctgcaggcatcattaaaggaaacggtgaaaggacaagcctattatacgttcacaactgccgccatttcaggtgaagcgaatgccaagactctattgcagcagctgaaacagagcactggcatcacaggcagctacaagtccatcaatcaaaaaacaaccgttgagtcatacaatgtccaatcagcgtattcaaagggctgagtacagtaaaggacgccatcagccaaatcaagaaaaacaccggcgtatccggcagttatcaacaggttggaaaaagcacatcatataccgtgaatatgaagggtataacaaaacagcagctccaaaaaatagacactttctttaaaaagaaaaaatggcattacacgtcatccagcgtcaaaaaaacgacaacgtctgcagcttatcaaatcacgacggcaaagattttaggcgagcagcaagcaaacaaagcagcagccttctttgctcagaaaaaagtaaaagctgcaaaaacagcagctggatcaacagcagaaaatcaatatcagctcatctcagaagaaacatcagatcaagcaaaagtcacaaagggtttgaacatattaaagaaaaatcagctaagtgcttctgcgaaatccgtcaaaaaacaaatagctgacacgtttaaaatcacaaccgaatctctgcttgatcaaacgaaagtcaatcaggcactcacgtttttcaaatcgaatcatataacagcagcaagccagaaaaccggtcagacagctgcgagcagctatcaaatcacaactgaagctatcatcagccaagaagagattgaccgcactttaacatttttcaaacaaaataaaatcccagtcacaacatcaaaaacaggccagactgcatatacacaatacaaaatcgtgacaacacagctcagcagcaaaacagcattgaacaatgggttaacctatcttaaatcgaaaagtgtaaccccgagctacacaacgaaaagcaatacgctttataaaatcatcgtaaatgagcagttcacaggcaatgatacagctgctgcggcatcagcgaagctaaaacaattatacggatggacatcatctatcgtgaagatcaaaaacggtccgcaaatcatgaaaacaaattacaatctctcgcttcgtgatatggtccaaaaacaaatgacagtaagtccgcaaacagacggagcggcttacgtatcgctcacgtacattaatacagcaacatcaaccgttacggctgatgtactaaatatccggtcaacgccggaagtcagtccgacaaacgtgatcggccaatttaaaaaaggcgataaagtgaaaatcatcggacagataaacggctgggctaagatcaatttgggctggcgaaacgcaagcagtgatgaagtagttcaatacgtggatccaaataactttaccagggacagcaaatactacttccaatttctcaagctgtcacagacagcgggcctcagcgttactgaggtcaatcagaaagtgcttgcgggtaaaggcatcctgacagggagagcaaaggcatttatcgatgccgccaatcaatatagcatcaacgaactgtatttaatctcacacgctcttcttgaaacaggaaacgggacatccgccttagcaaatggattaacctataacggaaaaaccgtatacaacatgtatggaattggagcatacgacagcaatccgaattactacggagccaaatatgcgtacgagcagggctggttcacaccagaagcggccattatcggcggagctaaattcataggctcatcgtatatccacaacacagcttacaatcaagacacactgtacaaaatgagatggtcagctacagcgacacatcaatacgcaacagacatcggctgggcgtacaaacaagtaaaccgcatgtacagcctgtattcattgctggacggttatacactttattttgatgttccggaatatcgataaaaaacttagaaagttgcaaataggctgtagctattaaatagctacagcctatttgattatcacacctcaatcttgtccgcaacaatcataaaaatactcattcttgaagcatttgagatggctgcatcatcgggtctgatttttgtactccctttcataaaacctatttcaagcacatttgatttttctccgccggcaaaataccaggatcccattcggatatccttttgttttaagcggaaatctccttctatcgattgatgcagtaaactaatatagcgttcatttaatgtgacttgcaagtttccatctgcattgatagtaatatttcggactaaatttgatgtgtaagatggtaaataacctgaagtcggaaccatccattttttgttttgagcattatactctaaaatgaaggtttgcataaatggttgaaatctttctggaggtgtatcttggtgccccacggtttttaataaaggggatcgaagcataggtacatgattcatgaagttttcataagaatggtatgcataaattctgcttatacgatttccttcttttccacttgtaattcccaccattaatgattttgccccagtttcaggattggtgtacatacagatcccttccggttcacggaagttattctcatatctggtggacaagtctttgccaacagtaatttctttttgcagcactattttattatcggaatcaaatacagttatgagattcggatagcttttgctgtttgtatctcctgtataccaatataaataaccgtcatctaaaaagaaaccttgtaaataatgaagttcgtcaggaatgttaatagtataaagaggattgtttttatttgctattgcatcgtccaggttaaagattgtcacccactgtttattattattattttttgtatcgtattgtctaattgccaactgtctattcttcatatcaagagcaggtgtaaccctatgatcgaaaggcatattcgagaatcgctgaagttctttagaattttcatctaaagtcgcgcctgctttatatgggaaacaaactaattcacttttatctgtttcgtttggtttatcgtatagagaccaaatataaatggtgccattacggttttcaattccaatatttgtaccatgacctccatgtttcaacagcatgctgtctaattgtaaaccttcaagagatagacgagttatgcgatagctttgggtgttgtcttttcctaatccacttgcgacttgggttgtataaatttggtggtttttctcatcgaaattgaatgattgaagtacggttttgtctgctacacgtagttcagtaaataattttggcgtgatgttggtgaaatcaaacagttctttttttctcataaatttaccacctctattattatttgctgccataagcaactaattacattaaagcaaacatacgttcggtattcaatagaaaaaagaacacttgttctgttttgaacaagtgtcatcatttagcttattaaattttcgatgaaattcaataaattttggcttgaattcccatcagaatacttattccatctatcggaaaaaacttttattttggaataattaaatggggtttgaatttcatttattaatgattcactgtcatagcaggctcttccaggtattatggaaagataattatcaaccaatccccgcttctgttgataaagttttaaatcgtaagtataaaaaagaatgggtttatttaaaatcgaaaattcaaagggaacagaagaatagtcagtgattaatatgtctgcagccatgagtagatcaaacaaggcatagttagaaacatctttaatataatcactggaatatttaatatcaatattgttctgaatggcgggatgcagcttaacaaataaaacatattcttcttttaactgatgaattaattgttcttctgtaaaaggcaattgaattgattgcatattataatctctaaacgtcggtgcatagaggattattttttttctttgtatgtttagagtatctgaaatttttttcttgttttctcggtaataagggtctgttaaaggtacacctatttttaataattggttatcctttattccaaatgatttcttgaagatatttgccatctcttctgagccaacagttaaataatcatacgaactgtatactttttggaaccttttaatatcagttttcgtccgttgcatgtttgtaatgtcttccaaaccaaattttttgagtgagccatttgcgtgccatacttggatacatttcgtttgcttccgcttatttaacacacttgttaatagaaagtaattatctgttatgatcactttactgttaaacattaggtatacagctttaatgagatggatagggtttttttcttgtaataaatatgcatctacattcgggaagctctcggcaatagcagaggcctgctgggtatacaggatgttaagtttataagagtattgtccttgttcatattcctcaagaatcgcttttgcgtttgcttcgaatgagatcaggagggtcactttgctttcaggtttcacccattgcagaaaaaaggcgattgctgataaaaaatacaaatagcaattcgccagtagtgatcttattttcatttttatcatccatttatttgaaagttttgtttttaaatctgttttgtatgatctttttcaggctttggatagaaagtttttttgtttttttcttcttttaaaaccgttaaagcatattttgggatgctaagcattcttttccatcgccatggattcaagattaaccggtagaaccattctaaatttaaacgtatcatccaggaaggggcccgtttgacattaccgctaaatacatcaaagcttcctcctagacctatagatacggctttagggaacaagtgtctgtagttatgaatgaatttctcttgatgaggataccctaaagctacgaataccatgtcaggatttgctcttgcaatttgttttgccactagggtgcgatcttgaacataaccgtctgaataacctgcgattttaatgtttgggtattcagaagaaattttggatacaacaccttttataacatctttcttcgcaccgtacagaaatatgcgttttttctttttgttagcaacgcccagaagttctttaaaaacatcgtaacctgcgattcgggactgaagcctgttgttagtcaaacgtgacatcatgactacaccgatcccatcaggcaaaatgaagtttgaagaagatagtacatcaaagtagtcccgatctttaatagctgcaaatgcaatttcagggttgactgtggaaatgacagcaccaatcttttgatcaatataatgtttctctagataatcgataaatgatgttaagttactgttaacataaggaatattgtgaatagtctctgtttgcatgtctggctcctccttcctttaagattctatttatatagttaaaaaccgagagtttctaaaagcaaaatcaagctaccttatattttaacataaatcttcaacaaaggattaacattatctttacattaaatttaaatatgtttccaattttacaattgaatgaacgaatgaacaacagaccttggtgccaatggagtctgagtgtaattacatattttggaatgtttttctcctcatgagtacttaaccttttttaggcggtatgctataattaatgatcagtgaagacatacgagaaatatgtcgatataaggaatacaaacaggtttttagaatttaatcgctaacgtcagtagtgtttttaatagtgtttaacattaggaaggagcgtttctttaaatgaaaaaagttatcacatatggaacttttgatttactgcattggggtcacattaaattgcttgagcgtgcaaagcagcttggtgattatttagttgttgctatttcaacggatgaattcaatttacaaaagcaaaaaaaagcttatcacagctatgagcaccgtaaattaattttagaaaccattcgatatgtggacgaagtaattcctgaaaagaattgggagcaaaaaaagcaagatattattgatcataatattgatgtttttgttatgggggatgactgggaaggtaaatttgactttctcaaagatcagtgtgaggttgtttacctcccaagaacagaaggcatctctacaacaaagatcaaagaggaaattgctggtttataatttaggatcctgatatcattggttcaatatctaattaaagtacttcttattgaaataagaagtactttttgatgcttacattgatttttgtgactaaagtatccgggtagatataaatttcaatgatcatatattctagatgccgaaagggagtaaaaaattgtctttacatgcggtgagtgaatctaatataaaacaaattcctgacatggattattattttatctctggtggactgccaagtaattatggcggtctgacgaaatcattattattgcgttcaaaattatttggagaagagtgtaaccaaaacacctttttcttaacgtttcgttttgatttagagttgtcttcaaaaattgatgaattgtacagcaacggtaagattgataaaaaattcacaagtgttattaatctattcgatgattttttaagtgttagaacaaatgggaaaagatcatacgaagaaaggataggccttgaccagataaaaaagcaagttggaatgggaaaatttgcaaaaactgtgtcgagattgtttggtaagaagaacaatgaaatgtctgtaatttactacggagatggagaaactatccggtacgtcgactattggaatgataaaaaccagctcataaagagagaggaatatacgaagaacggaaacttagttctcgttactcattatgatgtgcagctaaacaagatgtatctgcaggaatatattaatgaccaaaatcaagtatatttagacaaactctatgtatggaacaatgaagaaaaagatgttcaattatctcatattatttggtactcccttgagggtgagataaaagtaaaagatgaatcggaactgcgtcaatattggatagaatatctgcaaaaacaaaatgataaacctaagttgtttttagtggacagcagaccgcaagacaaacatgtctttaaagtgaaaaaatcaccttcttcctattatggagcaattattcataacaagcattacggcagcaataaatatcaaattaagggtcgctataaagaagtatttagtcagatgtataatttggatgctgtcttttttataactgaggagcagctagaagattttaaattgatttcaggggaacaagagacgtttttctttactccgcatacaattgataagcctcttgatcccgctgtattgaatgtgccgagtgaaaaatacaaagctgtcattatttcaagacttgcatctatgaaaaatctgatacatgcagtaaaagcatttagtttagtcgtgaaagaaattcctgaagcaaaacttgatatattcggatcgggtgaagatttcgaaaaaataaaaaaagaaattgaagataccaaactgcagaacaatgtctttttgaaaggctatacggataaccctgactcagagtttcaaaaagcttggctaaccatttcaacctctcattttgaagggttcggtctatcaaatatggaggcactgagcaatggatgtccagttgtaacatacgattatgattacggagcaaggagcttagttactgacggagcaaatggatatgtcattgaacagtataatatagagaaattgggtcaagctattatctctttgatgaaagatgaaagtactcatcaaaaattttcagaacaagcttttaaaatggctgaaaaatattcaagacccaactatattgaaaattgggcttttgctcttaatcagatgattgaggtgcgaatagaaagagagaagttctctaaaaaggttggaaaaaaagatccttctattagttcctatactgaggattttgataaaactaaaatagaaattgacattgagaattttgatcataatgatattaaaaaaatacgtttagtgggcttggacagaaagaataaggctgaaattatttcaacaaacttacaaaatgatcaactgtttgtaattgatctcgaaaaagatgtaaatattgaaaagatagctgctaataaaacccaagttattgatttttatattgttttcaatgcaaatggccatattaaaacaatgcgaagactttcgagtgaagaaacaaaattgtcaggaaacagtatagatactaataatggctatagagtagagccctatacaacagttaaaggcaatttctcttggagggtcacggaaataaaagagagttaatattttgggtaatgtccttagtagttgacactaataaaaggaagcaaaaaggaaagagcttttatacagaggagcagaaaaaagtaatgattgaaaacactgtgattaaatgtattttgaaaagcttgaaaaacaatttaggaagtcttgaattgttaatctcaattgattcagaacaccaatttttagaggattaccagttatttttaaagctgaaagagagacgttcaggaacggaatctgaatttccgcttcaaaacactggctcattagagtataaaactgagataaatgctcatgttttgcctatgcctgttgaaatgggacaaacatatgatttttatgtcgaatttcgaaaaaaatatgaagatgcggagcaggaaccactcttgaagcgtctttctgctgaagtaaattcaattgagcgcgcctttcatgtcgatcaaaccacagaacttttgattttaccttatacaactgataaaggcaacttttctattaaggtgaaaagagaggccaaaatcatcagatttgatcaaatcgagattagctctgaagaaataagcataacaggttatgcgggatacctgagttccgaaaatcaatatcggataaaaaacttgaaccttattttaaaaaagggtggagaaacacctattgaggaaaaatttccaatcaagctagatagaaaaacacatggccttgaaaacatgagagcagatggttttgttccggaactgtatgattttgaagtgaaagtgcctttgaaagaaattcctttctcaaatgaaaaacgttatgtttatcgtctttttatggagtatatatgcaatgacgataaaggaacggatattcagttcaacagcactgctcttgttttaggagatcgaaaaaacaaattaaaaggattagtaagtattattaaaacaaacaacgcaccagttcgttatgaagtctttaagaaaaagaaaaagcagactctaggtatcagagtaaacgactatagcctgaaaacaaggatgaaatactttattaaaggaaagaagaagagattagtatcaaaattaaaaaagatcacaaaaatgagaaacaagttaatcactaaaacatacaaatctctattcatgatggctagcagaatgccagttaaaaggaaaacagtcatttttgaaagttttaatgggaaacaatacagttgtaatccgagagcgatttacgaatatatgcgggaaaaccaccctgagtataaaatgtattggagtgtaaataaacaatattcagcgccttttgacgaaaagggaattccttacatcaatcgcctctcattaaaatggctcttcgctatggcaagagctgagtattgggttgttaacagccggcttccattatggattccgaaacctagtcatacaacatatttacaaacatggcatggcacgcctttaaaaagacttgcaatggatatggaagaagtccatatgcctggtacaaacactaaaaaatataaaaggaattttatcaaggaagcttctaattgggattacttgatttccccaaatggttattcaactgagatctttacacgggcgttccagtttaacaagacaatgattgaatctggatatcctagaaatgattttcttcataatgataataatgaggaaacaatatcattgataaagagtaggttaaatattcctcgtgataaaaaggttattttatatgcccctacatggagagatgatcagttctatgcaaaagggcgttataagttcgatctcgatttagatttgcatcaacttagacaagagcttggaaatgaatatatcgtaatcttaagaatgcattatctggtagctgagaattttgatttaggtccttttgaaggatttgcatatgatttttctgcttatgaggatattcgagaattgtatatggtttctgatttgctgattactgattattcttcagtattctttgattttgcaaatttaaaacggccaatgctattctttgtccctgacatcgaaacctaccgggataagttgcgtggtttctactttgattttgaaaaagaagctcctggtcctttggtaaaaactactgaagaaacgattgaggctatcaagcagatctcatcgcctgattataagcttccggtttcttttggtcctttctatgataagttttgctatttagagtcaggacgttcatctgaaaaggttgttaatactgtatttaaagctgaataatttaggttattttataaaatgtatagctgtcgatatttcggcagctttttagatacttgttgagaagtgaaaaaaaatgcaggatctgttacaataatcagcggtgctttcaaatttttaaacagaaagattcccaaaaacaattaagtctaaggaagataaaaaatgaatgatttgttgcgtatactcagagagcaaataacgtcatttcctttaattttaagattggcggcttatgaaaccaagtctaaatatcaaatgaattatttaggtgtcttatggcagttcttaaatccgcttatccaaatgctggcctactggttcgtatttggtatggggattagaaagggcggtcctgtgacaaccggagcgggcgaagtgccttttattatttggatgctggcaggattaatcccatggtttttcatcagtccaactatacttgatggatcaaatagtgtatttaagcgcattaatatggtggctaaaatgaacttcccgattagttctctaccgtccgtggccattgcatctaacttatttagttatatgatcatgatggtgatttatatcattgtactcctagttaatggtgtgttcccgagtgtgcattggttacaatatatttattacttcatctgtatgattgcttttatgttttcgtttagtttgtttaactcaacgatcagtgtgctgattagagattatcaatttttgctgcaggccgtaacaagacttttgtttttcttgttgccaattttttgggatgttaatgcgaaactcggtcaaagccaccccgaattagtgcctgttctgaagttgaatccactattctatattattgaaggattccggaacagcttcttagatggagcatggtttttccatgacataaagtacacgctgtacttttggttgttcacattccttttattgttagtaggttctatcctgcatatgaaattcagagacaagtttgttgactttctttaatacgtaaggagattttacgatgaaactaaaagtttcgtttcgaaatgtttcaaagcagtatcatttgtataaaaaacaatcggacaagattaaaggattgttttttccggctaaggataatggtttttttgctgtgcggaatgtctcctttgacgtgtatgaaggggagacaatcggctttgtaggaataaacgggtcaggaaaatcgaccatgtctaacctgctggctaaaattattccgccgaccagcggtgaaattgaaatgaacggccagccgtcgctgattgcgatttcggccggtttaaataaccaattgacgggccgggacaatgtccggctcaagtgtttgatgatggggttaaccaataaagaaattgacgagatgtatgacagcatcgttgaatttgctgagattggcgattttattaatcagccggttaaaaactattccagcgggatgaagtcgcgtctcggtttcgcgatctccgtgcatattgaccctgacattttaattattgacgaagcgctttctgtgggggaccaaacgttttatcagaagtgtgtagacagaataaatgagtttaaaaagcaaggaaaaacgattttctttgtcagccactcaatcggccagattgaaaagatgtgtgaccgcgtcgcttggatgcactacggcgagcttcgtatgtttgatgacacaaaaacggttgtgaaagagtacaaagcgtttattgactggtttaataagctatcgaaaaaagaaaaagagacatataaaaaggagcaaacggaagagcggaagaaagaagatcctgaagcgcttgaccgtctccgaaaaaaaaagaaaaagccaaaatcactggctaatgctgttcaaattgctattttgtctattctgactgtcttcatggcgggaacgatgttctttaatgccccgcttcgtacaattgcttcgtttggcgctattccgcaaaatgaagtgaagaaccatcatggcgatgcaaagggcaagtcggaggaacgcttaaccgcagtcaataagcaagggtttatagcaaatgaaaaagcggctgcttataaggatcagggtttgaaacagaaggctgacgttacactgccattcggtacaaaagtaacggtagctgcaaaaggcaaacaagcagcgaaaatacagtttaacggacagtcttattttgtgaaaaagagtgctgttgcagctaacatgaaacatgctgaattgcgtgctgctgcatttacgtcttatgtctcgcaaaacgcagcatcttcctatgaatactttctgaaattcctgggagacagcagaaccagcattcaatccaaattgaatggatatactgaaggggatacggctgacggcagaaaaacgttagattttgattatgaaaaaatcagctatgtgctggagaatgataaagcaacagagcttatttttcataacatttctcctatcaacccggcgtcactatccttaagtgatagcgatgtattgtatgacagcagcaaggatcgttttcttgtgaatacagatgatcaggtttttgcagttgataatgaagagcatacactgactttgatgttgaaataaaaaaaggctattggatgaatgtccaatagcctttttgtttagatttcttctttgtttagtaaaccttccataaatggcacgagctgatcgcgaagttctttatcctgcatcgcaaattctagagttgttgtgataaagccgagcttttcaccaacatcataacgcttgccttcaaaatcgtaagcaaacactctttgaatttcattcagtttttgaatggcgtctgtgagctgaatttctccgccagcgccaacctgctgctcttctaaatacatgaggatctcaggcgtgaatacgtcggcctaagatggcaagattagaaggtgctgtgcctttaggcggtttttcaacgaagtttttcacctgataacggcggccttcacttgtcagcggggcgatgaagccataacagtgtgtttcatcttcaggcacttgctgaacaccgataatagaagaaagtgttctttcatattcatccgttaattggcgcaaccctagtgtgtcagcctgaacaatatcgtctccaagcagaaccgcaaacggctcatcgccgataaagttaggcgcgaaccagacagcatgtccaagacctttaggttctttttggaggatatagtgaatgtcggccagattagaagcttttttcactttctcaagaagctcggttttttctttatctaattaattaataggtttcgtttgtatcgtatcaacctttctttcatctatatgtctataaaaacaagtgtcattcgtataggttgattaaagtctcttagcttgaaaacattttactctatcttaccgcaaaaatctttaggaacttttaacattcgtattacaattccttcatgttttgacgatgtattaatatgagaagggcgtacaaaataaatggtgttgcagaaagaaaacgtttcacttaaaaactcgacaaaagaatagatttttccgaaaaagaaaactcgttataaagggtatagataagatattggacctgcaaaaaatatacaacaatacaacggtgatacaaaaaatgctggtgattaacatttttaaagagtcttaacttttataggaacttatgctattattgttcattattaatggtacgtaaaaaatatgtcgaaatgataaacaacctgttaaagtttttggtttttttctggtactctcagttggaaggtgatgttatctcatgaagaaagtgataacgtacggaacatttgatttatttcactacggacatatgaagctgctggaaagtttacctttcaagaacaaaagccatttcaactaccaaatcaaaaaacacatggctagtttatagacgcactaactaaaagaggcttgaatcattcagttgcttctttttttcttgtttgctgagataagtatttaattctttgatatttaaagagaataaaatgaaatcaaagattttaatgaaatatagaagactattggtcagtgtatactcaattatttttagaataattgggcttttgcccagaaacgaaagattactcatcttcgaaagctattcaggcaaacaattcagctgtaatccaagagcaattttcgagtatcttgaggaaaataagaataaatatgaatatggatattttggagtgtagataaaagagacaaagatttatttgatgattcagatgagaattatttgaaaaaatctctctcaaatggctgttgtatttggctacatcaaaatattggataacaaacatccacttgccgctataggttctaaaaccgagaaacactacatatgtgcacactgggcacggaactcccctaaatgcaaatgacatggataaagtacatatgcccggcatgaagactgaataatataaaagaaactttcttatagaagtcagtaaatgcggttatctcatttcccttaatgcttactctacgaaaatttttaaaaatgcgtttcagtttaaaaagacgtttattgaatagggctatccgaggaacgattttttatataaaaaaaatagcaatgaaggaatgctgaaaataaaaagagataactcattttatgttaaaggtaaatataaatttaatatggtgttggatttagaaagtcttaaagaccaattaagtaatgaatatattgttattttaagggtccactatcttgtatctgaaaatattaacttaactgaatacatgggttttgcttatgatttttctgatcataatgatattagagaattatacttaatatcagatatattaataacagactattcttcagtatttgcttattatgtcggtttaaaaaggcgttatgttcccgatattaaattttatagagataaactaagagatttttattatgattttgaaaagtgtgctccgggacctctttttaaaacaacataaaaagtaaattgaatccatacataaaacaagagactataaacaggatgaaaacattacttcattttatgaccaattttgttagttggaaaagatgattcattcaaaaaaagttgtggaagactactcggataaatacttattattttaaaggagcacttgagatgttgttttcaattgtaatgcctgtttataattcgggattatatataagagaggccattgacagtattattgatcagacaattaattttgaaaaaaacatagaaataatattgattgaaaataatagcatagataattcaaaaaacatatgtgaacaatacgcaactgcatatccgaataatattaaaattatttatcaagatgaaccgaatgtcagtatggcaagaaataatggattaaaagtttgtgataatagtaaatatatagggtttatagattctgatgacaaagtctcactaaatgctattgctgaggtattaaagttttttgaaaagcataccgatattaatttagcggtactgccgctatttttcttcgataataaaaatggagaacactcacttaattatagatttaaaagtggtgaaagcattgtaaacataactgataattacactgctattcattatcacataggtggaacattttttcgaaaaaaagcaatagaacgtcttggtcttgcttttaatgaaaaaatggatttttgggaagatgttttatttattaatacgtttttaattaaagaacaaaaatatggccttattcctgccgctaaatatttctatagaaaaagaaaaagtgaggattctctagtagacacttcgtggtctaaaaaaaacaggtatacttttttacttacaaatggatatggtgaaatggttaaaagatcattagaagagtacagcgaagttataccttatgttcaatgtttaattcttaatcatttaaaattatttatttttcaaaaaaacaataacaaggtttatgaagtgctaaataagatagaacagagtgagttttttaaggaattatttcacgttttgaaatatatagatgagaatttaattgtaaaacaaaacatgaaaacatatttaaaagagtatctcatttcatttaaacgatggggttatcctgtcaacagacttattcaattagggaaactagaaaatgaaaaaatcgttattacttcatggaaagtcaataaattttcaattgagctaatggtaagtttgagtaatgaagagtctgtgattaacgataaaaatagtgtttatatctcttatggaagaaaattgagaaaagcaaaattaataaacaagcaagaacataagaacatagttatttggggaaccacagttagggatagaaaatattcttcatatcaattaaaacttccgataggagttactttttttaggtttattgttgaaaaagacaacaatttaattgatcttcaaaaagttaatgttttaactagaatatttcaaaagttgattagaatctaatacccttgagtaaaaagaaataaattaaaggagattgaaaaacttggaacaaaagaattttttcttttctattataatggcaatttacaatgttgaagaatttttagatgaagcaataacaagcataattgatcaggcacttgattttgagcatcatatacagttgattttagtcaacgatggaagtgttgatgcatcaggggaaatttgcttaaagtataaagaagcgtatccagaaaatatagtctttatcgataaggagaatggcggagcaagtagtgcgcgtaatgagggtttaaaatatgccaaaggtaaatatattaatttcttagatcctgatgatacattgtccccttcaacccttttaaaagtatatgatttttttgaaaagaattattctaaagtcgatgtagtttctattccaatgatgatgtttggtaaaacaagtggtccacacttattaaattataaatttgataaaactaggctagttcatatcttgaaagaacatacaggaattcaattatcagcaccaagttcattcgtgaaaaaagaagctgttaaaaatcacttttttaatgaagatatggcctacgctgaagatagtgaatggctgactaaaattataatgaagcgccaagtatacggtattgtgtcagaaggacaatataattatcgacgaagagaagatgcgtcatctgcaactcaaacaggtaaaaatgataaaaaatggtatgtggattatttgaagaatttctctcgagaattaattaatcatagtattacaactttaggatacgttccaagatacattcagtatatgattgcctatgacttgcagtggagaataaatatagaagacagaactgatgttttgacggataaggaagttgaagagttttttgacttgctagaaagaatacttgcatttatagatgacgacataatctttgaacaaaaatctctaaacttgcacagaaaatattttttaatcaaattgaaatatcgaaataaaaaaaatgtatttaaaaagatctttttgaatcgtaatgtgaatttatattttaaagagaaattaattaattctatgagatatgaagctataacaatggagctattaagcattgaaaaggggattttaacccttgaaggtaattttggttcattatttgatgccgcagaattagaagtgaaagcatgtgtcaatgacaagatatatcatgccgaaaaaattgatagaacagtacacaacttatattgcttaaataagccagttaaagagtacctgggctttaaggttgatatcccagttggtgagcttgcaaataactcgaatattgaaatgatgatttcatcaaatggaaaactaataaaagtaaaaattaactttggacgattattcccgctggataaacatatagttgatttctataccaaaaatggtatagggatttatttcgatcataaacttaataatttagtagttctaaaagataaaaatcagattattagagcaaaagaaaagcgggctcaaagacgttttaagacctttaataaaataggtgctgagaaagcatcaaatgtaagaaagattatggaacacctctataaaataaagaaaaataaaagagtatggctttttatggatagaatcaacaaggcagatgataatgctgaagcattatttgaatatgcaatgcagcagaatgacggcatcaaaaaatattttattatcagtaaagatagtccagattataacaggctgaaaaaaataggaccagttgttgcatacgggtcacctaagcacaaatttttacatttacttgccgatgaaattatctcttcacatgcagatgattatgtagtcaacccgtttgtgaatatgaggaaatattataaggacttatttaaatttaactttgtttttcttcaacatggaattacgaaagatgatatttcgggatggcttaataagtataagaaaaatattagactatttatcacagccgctcaacctgagtatgagtctataattaatggtcattataattattcaaaaagagaagtaattctaactggatttcctagatttgataagcttgttaatcataatcataaaaagatattaattatgccaacatggagaaatcatttagtaggaaaaataaatccgcaaacagggaaaagagattactcaccactctttaaaaactcagtttattttaatgaacttaataatttattaaatgatgctaaactcattaatgaggctaatgaaaaaggatacgagatcgtattcttcccgcatccaaatattgttcagcagttgaaagatttcaacaaaaatagttcagtgaggattgcggacattaatgaaagttatcgagatcatttcaataatagtgcgattttagttacagattattcatccgttgcatttgactttgcttatcttaaaaaacctgttttttacttccaatacgaaaaaaatcacttggaaaaagggtattttgattacaattcaatggggtttggagaagtaattgctgataaagatgctttagttgataagctgataaattgtatggaaaacgattgtataatggatgccaaatatattgatagagtaaatcaattttataagtatacggataaagaaaactgtaaacgtgtttatcaacaaattattagtctaggaactaatattaaagagggaataaagaaatgaaaaaagtagctgtttatggtagttgtgttacacgtgataactttaactctcaatttaatgctgattataaaaatttttttgattgtgtattgacccaaaaccaatcgtccattatttcaacaatgagtaaacctaactacattgttattgataatgagaacatgtctaatcatgaaaaaaacactttaaagacggattttgagaatagctttctaaccgagattaaatctgttcagccagacattttgattttggactttttcgcagatgtgcattttggctacgtagaaatttcagataaccagtttgttacaaataacagatggactctccctaaaacgaattattataaatttacaattcaaaataaaaaacaaagttttaatatagaagatcattttgaaaattattttgcactatggaaacagaaatttaatcttttctataactacgtcagattaaattgccctaaaaccaaaattatcttaaatagtgcaagaaacgttcatcacttttttgataaagaagatcagaaaaaattgcttataaatggagggaacatcaaagtaattgatgttgattattataataagatttggaataaatttgacgcatatgtattagatagcttcaatgatatcgaggcgatagatttatttaaaaataaaagctataattcctttgaaaaccatccatggggcaaattttatgtgcattatacaatggattattacactgatttttttgaccagtttaaaaaaataagtctatagagttaactcttcgacgaagggttaaacgtgaaaattgagataatgaacatttctgcaaatcataaaaatgatggatggatatatttggacatgccgaccgaatagaggaatttgagggcctggctcataaattaaaagggattaatatggtagccaaaatgaactttccgacagttcactgccttctgttgtaattgcttcaaatttatttaattattttgtaatgctggttgtttagtcattgttcttttagcaagtggtgtttacttagcttgcattgaatacaagatatttactatttaatctgcatgtttgtatttatgttttcatttagtttgtttaactctacaatcagtgtgtttgtctgggattattaatttttgcggcaggccgttgatcaggtcttcgcagttgataatgaagagcatacattgactttgatgttgaaataaaaaaaggctattggatgaatgtccaatagcctttttgtttagatttcttctttgtttagtaaaccttccataaatggaacgagctgatcgcgaagctctttatcctgcatcgcaaattcaagagttgttgtgataaagccgagcttttcaccaacatcataacgcttgccttcaaaatcgtaagcaaacactctttgaatttcattcagcttttgaatggcgtctgtgagctgaatttctccgccggcgccaacctgctgctcttctaaatacatgaagatctcaggcgtgaatacgtaacggcctaagatggcaagattagaaggtgctgtgcctttaggcggtttttcaacgaagtttttcacctgataacggcggccttcacttgtcagcgggtcaataatgccgtagcggtgtgtttcttcttcgggcacctgctgaacaccgataatagaagaaagtgttttttcatattcatccattaattggcgcaaccctggagtttcagcctgaacaatatcgtcaccaagcagtaccgcaaacggctcatcgccgataaagttgcgtgcgcaccagacagcatgtccgagacctttaggttctttttggcggatatagtgaatgtcagccaggttagaagcctttttcactttttcaagcagctcagtttttcctttttcttctaggtttctttcaagctcaggagagtaatcaaaatgatcctcaatcgcacgcttgctttttcctgttacgataataatatcttcaataccggcttcaacagcttcttcaattatgtattgaatggtaggtttatcaacgataggaagcatttctttcggcattgctttcgtagccggaagaaaacgtgttcctaagcctgctgctggaattatggctttacgtacttttttcatttaaaaggcaccttccttatgatcgaaaaaatttatggttaaactattctctatttacccttttcaatatgtttttacacatttttatgatatcggataaaccatttttaaacaagctttatccttaatattaaaacttatatcattttatttgaatcaagaatgaaatgatttaaaatgatgcattttcatgtagaatatgtagtatgaatttatttactatagcagaaaaccaggtgacaaatatgaaaaaactaaaagtgatgaccgttttcgggaccaggcctgaagcgatcaagatggcaccgcttgtgcttgaattgaaaaaatatcctgaaatagattcctatgtaacggtaactgcacagcacagacagatgctcgatcaggtgttagatgcgtttcacatcaagcctgacttcgatttgaacattatgaaggagcggcagacactggcagagattacgtctaacgcacttgtaagattggatgagttgtttaaagatatcaaacccgatattgtgcttgtccatggtgatacgacgacgacgtttgccggaagcctagccgctttttaccatcaaattgctgtcggtcatgtggaggcggggctccgtacagggaataagtattccccgtttccggaagagctcaatcgacagatgacaggggcgattgctgatttgcattttgctccgacaggccaggcgaaagacaatttattaaaagaaaacaaaaaggccgactctatttttgtaacgggcaatacagcgattgacgcactcaacacaacggttagggatggttactcacatcctgttctcgatcaggtgggtgaggataaaatgattctcttgaccgctcaccgccgggaaaatttgggtgagccaatggaaaacatgtttaaggccatccgcagaattgtaggggaatttgaagatgtacaagtcgtttaccctgtgcacctgaatcctgttgtccgggaagcggctcataagcattttggtgattctgacagagtgcatctgattgaacctttagaggtgatcgatttccataactttgcagcgaaatcgcattttatattgaccgattcgggcggcgtgcaggaggaagccccatctctcgggaaaccggttcttgttctgcgtgatacgacggaacggcctgaaggagtggaagcgggaacgctgaaacttgcaggtacggatgaggaaaacatttatcagcttgcaaaacagctgttaactgatcctgatgagtacaagaaaatgtcccaggcttctaatccgtatggagatggagaggcttcccgccggattgtggaagaattgctgtttcattacgggtatcgaaaagaacaaccggattcatttacaggcaaataaaaaagaagctttgcacattgtgcgaagcttctttttgttttacttttcgaggctttccttcagctcttttgtaatatcggaaagggcgctttcatcagcttggtagtagtaaattccattgattttcgtgcctgtaccttttagttcgtgctgtttaatatgtttccgcgcacctttgtaatcggactggatatcccacatgttatcgaaggtcaagttcgttttcacattattttcaacaactttaaacatatctccgaatttcgtgatggaagaaatattagcgcctttattaataataccttggatgacttggcgctggcggtcctggcgtccgaagtcgcctctcggatcttcttttctcatccgggtataagcgagcgcttcttttccgttcagcgtgatttctcctttgccgaacgaataaccgtcataactgaacgcgaatgtgctgttaactgtaatgccgccaagtgtatcaacaacgtctctaaagctttccatgttcactttcacaaaataatcaaccggaacatcgaggaagttctcaacagtgtctaccgtcatctgtgtgccgccgaaagcgtatgaatggttgattttatccattgtgccttttccgataatttttgtatacgtgtcacgcggaatgctgaccatgtcggttgtattcgtttttgggttaacggtcatataaatgagcgtatcggcacggcccttatcgccgtcgcgttcatccacacccatgattaagacggaaaaaggatcttttttattgatactgacctctttatccctctttttagatttatcaatgctttcatgaatacttgccacggttgaagctgctttatgccataagtagtatgcatagccgccagttccgagtacaagaagtccgattatcgttaaaattgtcagtaataaagtttttttcttttttctgcgttcgtttctcatcctttgcacctcgtctgttaaattactttcattatgagttaaatttccaataaatacaactctatttaatacaagaatgaaatcctaaaatagtcgttttttataaaaaaagtttcattgtttcttaatttttctttaaaatataaaataggttgacgataaaatataatgaggtgaaaaaaatgaaaaaatttattgctttactgttctttatattgcttctttcgggttgcggggttaatagtcaaaagagtcaaggtgaagatgtatcgccagacagtaacattgaaacaaaagaaggtacttatgtagggttagctgatactcatacaatagaagtaacagtagataatgagccggttagtcttgatatcactgaagaatcgacaagtgatcttgataagtttaacagtggagataaggtcacgattacatatgaaaaaaatgatgagggtcagcttctgttaaaagatattgaacgtgccaactaagatatagggaggaacctgaaattttgaaatcttgcaaacaattgatagtgtgttcacttgctgcaatcttattattgattccatcagtttcttttgcagcagactcaaacatctcagttaaattgttaaattatattggaaataaatctagcatcagtctatcgccaacaggattttataaagtaactggagataatgttgctgttacggatcgttttgcaggcgcttcacgatacgaaactgcgactcttgcatccaacagccagtggaaaaatcctaatacagtgatattggtgaaccgagatatttttattgatgcattgcctgttattccattggcgaaaaaactgaacgcaccagttttatttactcagcctgacacgttaacaaaaactactgaaagacaaattgctaagtttaaccctgataatattttaatcattgggggagcgcgaagcatttcaaaagacgtagaaaacaagctgaaatcatatggcgctgtgaaaaggataagcggaaaaaatagatatgtcttatcagaaaatattgcaaagcaaatgggcagctatgataaagcgatcgttgtaaccggaagagtatttcaagacgctttagccattgctccatatgcagcagcacacggataccctattttgcttacagagaaagacaagcttccggattatgatttgccaaaacaagtcatcattataggcagttcatttagcgtcagtgatagtgtagaaaaccaaattaaaaaaacttcaactgtgcaaaggattcctggatcaaccagatatgaacttacggcaaatataattaagcaactaaagttgaaggctgataaagtcgtaatgacgaacgggacaaaatatgcagacgtattgataggcgcttcgcttgcctcgaagaaaaacagccaaattttatttgttaaacaagatagcgttccggctgcggctaaaagtataacgaaagataaagccacatatgcatacgactttattggaagtaccagttcaatttctgctgaagttgagaattcacttgctgatgaattttatttagctgacggtggcacctataatctaaaaatcaacagcggaaaattaaaccttgaaaacatcaaaacttacggaaactccctaagaattaaaccagaaaactattctacttcaaacagaattagtcttgatggaaagcagtatcttggcacggttaatttctctattgagtctactaaatatatccgaccggtaaatgagaatattccatttgaggattacttaaaaggagtaattccgaatgaaatgcctgctagctggtcacttgaggctcttaaagcacagactgtcgctgcaagaacctactcaataacaaaaacaggaactactgtacctgatacaaccgcttttcaagtttatggtggctacagttggaattcgaataccaataaagcggtagagcaaacgaaggggaaagttctgaaatataatggatctcttataactgcagcttattcttccagtaatggtggttacacagaagctagtaatgaagtgtggtcgtcaagtgtaccttacttgattgcaaaaaaagatacaaaggatcctcaaataggctggacgcttactttgtcaaaacaacagctagatacgaaatctttggacttaacgaagccttcttcttggtggtcttcagcgactgaaactgattctgcaagactttccggagttaagaactggatcttgaaaaataaagaaacaagcgctgattctgtcaaaattgcaagtattgacgatttaagctttagtggaacgacacaagggcagcgtgcaaaaacagcatcgatgaaagtgaagtattttgttaaaagcagtactggctcctataacttgagcaaaattacaaccattagtgtaccaacaagtgagttaagaacaatgattggagcgactgtatttaaaagtacttatgtgactgtaaaaaaagatacttcaaagtacacaatcagcggtaaaggatatggtcacgggatcggaatgagtcaatatggagcaaaagcaagagcagaagctggagattcatatagttcaattttgaaattttactatccaggtacaactctgacaagttattgattattttaggatataacgccatttaaggaggaaatcaattgcgttcttatataaaagtcctaacaatgtgttttctggggctcatactttttgtgccaacagctttggccgataactcagtgaaaagagttgggggaagcaatagatacggcactgctgtacaaatatcaaagcaaatgtattcaacagcaagtacagctgtaattgttggtgggagttcctatgcagatgctatttcagcagcacctcttgcttaccagaagaatgcgccattgctttacactaattctgataagctttcatatgaaacgaaaacaagattgaaagagatgcagactaaaaatgtaattattgtaggcggaacacctgctgtttcttctaacactgctaaccagattaaaagcttggggataagtattaaacgaattgcaggaagcaaccgttatgatacggctgcacgggtggcaaaagcgatgggtgcgacttcaaaagctgttattttgaacggcttcttatatgcagacgctccggccgtcatcccttatgcagcgaaaaacgggtatccaattctttttacaaataaaacatctataaatagtgcgactacgtctgtgataaaagataagggaatttcgagtaccgttgttgtaggaggcactggaagtatcagcaatacggtatacaacaagttaccttctcctacaagaattagcggttcaaacagatatgagcttgctgcaaatatcgtacaaaaacttaatttatcaacaagcaccgtatatgtaagcaatggattcagctaccctgactctattgcaggagctacactggcagctaagaagaagcaatctcttattcttacaaatggtgaaaatttatctacaggagcccgtaaaattattggaagtaaaaacatgtcaaactttatgattatcggaaacactcctgccgtaagcacaaaggttgctaatcagctaaagaatccagttgtaggtgaaacaatctttattgatccgggtcacggtgatcaagattcaggagcaatcggcaatggactccttgagaaagaagtcaaccttgatatagcgaaaagagtcaatacaaagctaaatgcttcaggtgctcttccagtactgtcaagatctaatgatactttttattctttacaggagagagtaaataaagcagcttctgcacaagcagatttatttctcagtatacatgcaaatgctaatgatagctcatcaccaaatggaagtgagacgtactacgatacaacatatcaagctgcaaatagcaagagactggctgaacaaattcaaccaaagttagcggctaatcttggaacgagagaccggggagtaaaaacagctgctttctatgttattaaatattctaaaatgccgagtgttttagttgaaactgcctttatcactaatgcatcagatgcaagtaaattgaagcaagcggtttataaagataaagctgcacaagctattcatgacggcacagtatcttattacagataatcgaaagagacaaatctaatcacagatttgtctcttttttatatgaaatgattaaaacaaataggacttgtatataaaatagtaaaagagtattaacaacatttatcagaaaaaacacgtaattcacacttcttaacataccatttacatccaattaacatccgtctgctaaactgactggcataggtcatcataacatcccaaacaaatcgtgaggtgtgtgtcagtgagtgcagagaaaagcatgaatgtgagtcgtgaattctcagttcagcaaatacattcttttacattatctgaaaagacggctcgttatttggcaataaagcgcgtaatggatatttggtttgcgctcattgggttggcgattgcgatgccaatgattgcggtattttcaattttgatttgtttggagacgccgggacctgccatttatacgcaggaacgcgtagggaaaggcgggaaaccatttaagctttataagcttcgttccatgaaaatagatgccgagaagtctggagcggtttgggcacagaagcaagatccgcgggtgacaaggatcggagcttttatcagaagaacgagaattgacgagcttcctcagctgtttaatgtgctgaaaggcgatatgagtatgattggccctcgtccggaacggcccgtatttacggaaaaattccagaatgagattccaggctttacacagcgtctggctgttaaaccaggattgagcggctgggctcaggtgaacggcggttacgatatgacgccgaaggaaaagctgatatttgatttatattacattcgcaatctgactttcactttagaattaaaaattatgttaaaaacttgtaaagtagtttggacgggtgatggtgcaagataaaacggaatgccattattcaccatcaatctgagcttaaaaagaagtagggaatatgatgtcaagtattacaaaacaaatcatgagcggtgcaaagtggacaagtatttcaaccatgtgtattacaatcatacaaattgttcagtttgccctgcttggaaatatgatgaccttaacagaatttgggcttgtcggcatgatcacaacggttacagttttcgcccagattgtgctcgatatgggttttggcgcagcattaattcagagagaggacgcgacggagcgccagctgtcaacattgtattggcttaacattatgacgggcgttttgctgtttgttcttttatatgtgagcagtcctgtcattgcgggattttatcaaagagaagagctggtgtttctggttcggattctggcgattatgtttttgatcgcgccaattggacagcaatatcagtatatgctgcaaaagcagctgcattttaatacgttaagcaaaatagagattttttcaaatgtattgtcattcggatatttagcgatagcggtttttatgatggatgcgattttggcgtacgtgatttctcaagtcctgctgcagtccagtaaagggattttatattgggctgtataccgaaaaaagtggcatcctgcttttgtttttgatttgagaggcatgaaggatttcttttcttttggagcctttcagctttcatcccgtcttgtgaacaggctgggagcaaatatcgacatgattttgatcggccggtttattggtgctgaagcattggggatttataacctcgcttatcagattgtcactattccggttttgaagatcaatccgattgtcacacgggtggcattccctgttttcgcaaaaaacaaatatgaaaacagcgcgatcagagaaggctttctgaatatgacaaaaatgctggcgcttgtttcgtttccgctgttaatcgggctcgtgtctgtgtcagacgcctttatcacagcggttttcggagaaaagtggcttgctgctgttccgatcctaaatgttctggcgattgtcggaatactaagagtgcttatgaatccaaatggatctgtgttgctggctaaaggaagagctgacttagcgttttattgggattctggcgtgctgctgctgtacggattatcactgtttgcagctgtacagacgggaagcctgctgacagtcgcatgggtgtatgccattatcagtgttgttaatttcctgatcgggcgctggcttttggcatatgtcatcaagcttaacctttcagcttatttccagtcgattatgaagccatttctgattactgcggcgatgggcatcatcgcgtttggtgtaagcctcagtaccgaacacttcagtatgcaggcagaaatgcggctggccatttcagttgcagccggggcgctgtgctatctctttcttttggtaaaagcgtaccctcaaacgaaaagcaaactactaagaaaaggacgtttgtcatgaagattttgtggatcacaagcgtatatccgagcagtatgaaacccggtgagggtgtgtttcatgagacacaagtgcaagagctgcaaaaactcgggcttgatatcactgtgatatgcccacggccttttcattcagcgcctgtccgcatgctgaaaaagacatatcgaaaaaaggatgccagaccggagtatgagattagaaagggaatacctgtttaccggcctttctatcgggcagttcccggccagctgaagtgggcgcagcctcatcggagaatcgcatcagccgttttaaaaaccatgaaacaatgcgacctatatccggatctgatccatgcgcattttgccatgccatcgggcggggctgcggcagtcgtgtcagagtccgcgcaaattccttatgtcctgaccttgcatggcagtgatgtgaatgtctatccgcattatagcaaaggagcgtttaaagccttcaagcgtgccgtaggttctgcatcagttgttttagcagtcagccacaagcttcaggaagaagccaaaaagctttcgggctttgacagctcggttttgccaatcggcatacagctcagccgttttcaggagaatgaggagacgaaagaggaaatcagaaaaagactcggactcccgctcgatcagcgtctggctgtctatgtcggccggctggtcagagagaaaggcatttttgaactgtctgaagcgatcgaatcgctgcaggactctcctaaggcagtctttgtcggggatggtcccgcaaaatcgatgctgacacagaaggggcatattgtcacaggccaagtcccgaatcatcaggtaagagactatttacttgcggcagatctattcgtacttccttcttacagtgaggggatgccgactgttgtgattgaggccctggcgctaagggttcctgttatttgtacggatgttggcggagtgtcgtctttattcggaaagcaccaacatctgctgattaaaccgaaatccgctcaagccttggcagaagcgatcactcggtacgaacatgagcaaatatggaagccggaagtagcagatgacttgtatgaaaccgtgcaggctcaatttgacgcaggaaaaaacgccaaggccttgcatcatcagtatcagacggtcacgaaaacgtccgtttaatcgtaagaaactgcgaccaatataaataggaagatcattttacaggagagggatgagcgctgtgaaaaaaatagctgtcattggaacaggttatgtaggactcgtatcaggcacttgctttgcggagatcggcaataaagttgtttgctgtgatatcgatgaatcaaaaatcagaagtctgaaaaatggggtaatcccaatctatgaaccagggcttgcagacttagttgaaaaaaatgtgctggatcagcgcctgacctttacgaacgatatcccgtccgccattcgggcctcagatattatttatattgcagtcggaacgcctatgtccaaaacaggtgaagctgatttaacgtacgtcaaagcggcggcgaaaacaatcggtgagcatcttaacggctacaaagtgatcgtaaataaaagcacagtcccggttggaacagggaaactggtgcaatctatcgttcaaaaagcctcaaaggggagatactcatttgatgttgtatctaaccctgaattccttcgggaagggtcagcgattcatgacacgatgaatatggagcgtgccgtgattggttcaacaagtcataaagccgctgccatcattgaggaacttcatcagccattccatgctcctgtcattaaaacaaacctagaaagtgcagaaatgattaaatactccgcgaatgcatttctggcgacaaagatttcctttatcaacgatatcgcaaacatttgtgagcgagtcggcgcagacgtttcaaaagttgctgatggtgttggtcttgacagccgtatcggcagaaagttccttaaagcgggtattggattcggcggttcatgttttccaaaggatacaaccgcgttgcttcaaatcgcaaaatcggcaggctatccattcaagctcatcgaagctgtcattgaaacgaacgaaaagcagcgtgttcatattgtagataaacttttgactgttatgggaagcgtcaaagggagaaccatttcagtcctgggattagccttcaaaccgaatacgaacgatgtgagatccgctccagcgcttgatattatcccaatgctgcagcagctgggcgcccatgtaaaagcatacgatccgattgctattcctgaagcttcagcgatccttggcgaacaggtcgagtattacacagatgtgtatgctgcgattgaagacactgatgcatgcctgattttaacggattggccggaagtaaaagaaatggagcttgtaaaagtgaaaagtctcttaaaacagccagtcatcatcgacggcagaaatttattttcacttgaagagatgcaggcagccggatacatttatcactctatcggccgtcccgctgttcggggaacggaaccctctgacaagtattttccgggcttgccgcttgaagaattggctaaagacttgggaagcgtcaatttataaaaagaaaaagtgttacttggttgaagctgccggctgctaggctcggccgccggctcctgaaacatcaggaaaggggttaaacatgtgagtatcaaacgatcagcggtccatacgctagcgttactggccgctgctatatttggagtcgtcctattgctgggagccatccataaagatataggtttcatgcagatggctgctgtgcttgcggtgttggcaattggcctgtttttactgacgcttgcaaccgcatttacaacaaaagaacggctctttatggctgtaatctatattttgatcgcctgcacttttttaaataatgcattttttgccattcatcttggatttttcagtttgttcctttaccggcttctgctcattgcagcgggttgccttcatattttcggcatggttcggaatcgaacccatattgaaagatggcatgggctgcaagtaaaagggattttactctttttcgccttttggtttatatatggccttgtttctctgctgtgggccaagtcggtaacagttggcctcaagtatttagccttattggcaatggggatcttcttcatttatcttattgtcatgtacgtgcaaaaaatggagcggctgatgattgtttatgccatttggctggtgatgacggtatttctgatgatcattggtttttacaatcatatcacccaccatcatcttgcgagttccacattgtacagcggaccggagtacaagcagcattatccgacatcggtcttttttaatcaaaatgactttgcgacctttttatccatcagcttctttttttacatcacgatgatgaaaaacattaagaatggatacatcaaggcaattggccttgtgctctcgctctgtgcgttgtatttaatttttgccactggttcaagagccagccttctgggcatttttgcaggtattgctgtctacatcttcattgtattgccgcctgttttaaagagaatggctatatggctgtcggcggcgggaattgctcttttcgcagttcttttcgccagcaaaatctattcaaagttttgggagctgtttctggccccgcagacgctgcattcatttcatgacaggcttccatcaaatgtggctcgggcaaatctgctgaaaaacgcttggcattttttccttgattcatacggattcggagtcggggcaggaaatgtatcctattatcttgagcattatgctgtatatgatactgacaatgtggcagaggtgcataactggcttgttgaaattcttgctaattttggtttgttcatcatgctgggatatttgtccgtttatgcctacctcatatgggtgctttacaagttttatgaaagaaaattagaaaatcagtcaaaactgatcacagaaggacttattaccgctatggtcagtttcctggtatcaagtatcagcccaagctctgtttcaaatttatttttccattgggtgtttatggcgctcgtcatcgccgccgtgaatgtgttaaggcgatccagacaaatgcctgagccgatgtacagataaacagactacaaaaagcagggagacttatatgaacgatatattgataagaatagcccgtcgcataaaaaaaaatatcatttggatcatagcggtgccaattatattaggtgcggcggggtatatcctgccgtcacagatcgctgatcaaaagagctatacagctgaagatactttggctgtggggagctatgatcatccggtttataacagcacagaagagattccgcttctattaaagagcgactcctttttgaaggaggcgcttcctgatgaaaaggatgaagatgtagcagagatcaaagagaagcttacaatcaatacggaatccaaatcgttactgactttaagctatagtgacgaggataaggatagaacggaatctgtcttaaacgccatatcctccaccttcctcaaaaacgatcaaaagctgtatgcagaaagagaagccgtcatccgcagcagcatagacgcgcttgaaggcgagtcggtgagcgaggattccaaagtggataaagagagatttttatatgaactcaaaaacacacagcttaacctgaaagcggcaagtgttactgattccgaaaccgtaagtgagacagcaggcggcggtatgtctccgaaaaagaaagcagttctcggcgttatgattggccttacgattgcctttatgttcgttgtcattcctgaatttttcagagaatccttttaaaatcatacgatggagatgtgatcatgaccaattggaaacctctcgtatctgtcattacaccttcctataatgcgcgtgactatattgaagacacggttcattcggtattagatcagagccatcctcattgggaaatgattatcgtggatgattgctcaacggatgggacccgcgacattttacagcagtatgaaaaaatagacgaaagaattcatgtggtgtatctggaagagaactccggagctgcggttgctcgcaacaaagcgttggaacgcgctcaagggcgctacgtagcatttttggacagtgatgacaaatggaaaaaagacaaactggaaaagcagcttgagtttatgatggagcgctcctgtgcgttctctttcacgggctacagcttaatggcgcaggacgggaccccgctcgataaattaattcatgcgccggaaagcctgacgtacgatgacgccctgaaaaatacaattatcggctgcttgacggtgatgattgacagggagcaaacgggacagatccaaatgccgaatatcagaacgagacaggacttagccacatggctgtctcttttaaaaaaaggatttactgcctatggaatgaatgaatgcctggctgaatatcggcttgtcaataattcaatttccagcaacaaatggaaggctgcgaaaaaaacgtggtttgtctacagggagatcgaacggcttcattttatgaaagcaacatggtgttttgttcaatatgcaaaaaacgcggtgaaaaaaagattatagctgcaaacagagagaaaaggtgatgaaggtggaaacaaaagaagcaatcattcatgtcatcgttgccactgctgaatggggaaaagaccaattgagatacagaaggcaccggctggcagaatttttagctgctcaggaggaaacgaaggaagttatttgggtatgtccggctccgcgtgcccaagggaaagagtttcaggaagtccattctggcatcaggcaattcgctgtcaaagacctgctgcagaaaaaaatgtttcgtttcggacgatatacagatgtcttttacagacataagctctccccattactcgatgagcttacacctgcttctgcaaacggtgaacgctgctgtttatggtacacgtttcccggattcccgctgctgtcttcgctgtattcttgggatcaggtcatttatgactgcagtgacctatgggctgcgccgatcagcggccgatcaaatctgctgtctgaattccggcgaaaagtcattaaatcggcagagctgagaattatacaacgagcagattcaataacctgttcatcagattatcttcacaaggaagtagacaaaaaactgactgcaggacgagaaaaggttcatactgtggaaaacggtgtggagtatgagctgttttctgcaaataaacaagctcccgatcgcagtatactgcaggggagagaaggaatagtgttaggttttattggcgggattaaaccgaagctcgattttaaaatgattaaagaagcggcactgcaaaagcctgattggacatttttatgggttggcccggatgccaccaatggtgatgtttcgtttcaagagctgctgaggcttcccaatgtcatatggaccggtccggcagatccaaaagaagtgcctcattatatggagcttatcgacattggcattatgccatataaacaatcaccgtataatcaagctgtgtttccgctgaaactatttgaatttttagcggcaggaaaacctgttgtaggcactaatcttccgtcaacctcaaaaatgcaaaagccgtatgtatacgaatatgtagagggcgatcatccgattgattttatagccgcttgtgaaaaagttctcggtcaaaacggagacgagacctataaagaaatgcgccgaaacatcgcccggacacaagattggaattgcttatttagacaaattatgaaatatacagggattcaaaaacatgcgtagtcctataaattgggatgcgcgttttttgattatacgtgtttctttttgatgaagcttgttataataactaaggagaaggtataatggaaggaacggttctctatataaataaagacttcatttaattccaaaggagacttctttatgcttgacgaacgcatgattcgcattgttgttgcgtttattgtctcgctgctgacagttttaatcataaccccaatcgtaaaaaggattgcgattaaaataggtgcagttgaccagcccagcaatcgaaaagtacatgacaaaatcatgccccgcatgggcgggctggccatatttatcggggtggttgcaggcgtgcttgcatccggtatttacacagaaacaaggatgacggcaattacagtcggagcattcatcattattgtgttaggtattcttgacgataaatatcaattaagtgcaaaagttaagtttttgattcaattaggtgtagccattatgattgtaagcactggcttaaaaatggactttttctcagtaccttttttaacagaacgatttgagttaggatggatggcttatccgctgacggtattatggattgtcggcatcacgaacgcaattaacctgattgatggattggatggccttgctgccggtctttctgttatcggcctgtcaacgattgctgtcatggcactatccggcggaaaagtgctcattctgtcactctcattagtcgttattgccagcacgctggggtttttgttttacaacttccatccggcaaaaatctttatgggagatacgggatcactgtttttagggtatagtatctcgattctttcattattaggcctgtataaaagtgtcacattgttcagtatcgttatcccgattattatattaggcgtaccgatttttgatacaacatttgctatcatcagaagaatattaaacaaacagccgatttcagcgcctgataagtcgcatattcaccatagactgatggcctttggcctttcacatcggatgtcggtcttagttatttatttaattggatttattttcagtatcagtgcgattgtacttaaaagtgccacaatttggctttctttgtttattatcttcattttgattatttttatgcaaatcatagcagaagtgacaggactcgtgaatgaaaaatttaagccgtttacaaagttttataaacggctggtgaaaaggaattaaaaactccggcttatgtgccggagtttttttctgcgcaaaaatgcccgatcctctaaaaggaccgggcattttttaataggatgaatcagttgttgaattcgttgtactgttgtttgagcttgtgctgctgtcattcgaatagctgcttccgttcgtcgtcccgtcagttgttgtgccagtgctgccagtgctgccagaactgcttgagctgtcagtcccgtcttcggtaccggaagtgccagtgcttgtatcaggagtataatctaaatgctcttgaagcgtttttctgactttctcgagatttgtagcatcaggttcaaagtaatatgtgttgttaggccctaaatacaaatcagaacctgtaatgctcaatgtgtcgatttttttgctggtaaagccgctgtaaatctgctgaagcgctaaaccttcagtaatgcgaatattggtttcaacgttttcgctggctttttctgcgattttatcaattttagcaatgttgcttgcacttgacatgcggtcaatcagcgcgtttaagatttgtttttgtctgtcattacggccaaagtctccgcgtttatcctgttttctcatccgggcatatgctaaggcttcttcgccgttcaaatgcatctcgccttttttgaagtaaatccgtttgctttcgtctacatcacttttttcatcgaaatcgaaaggcacgtcaacatcaataccgccgacttcattaatcacatctttaaatccgtcaaaatcaactgtgacatatttatcgatcgggatttgcaagaagttttcaacagtttcaactgtttcatctttaccgcctttgctgtaagcggcattgatcttcgtcttgcttcccgttgtgtcaccagctaattgcacacgtgtgtcacgcggaatgctcagcattttcatggttttatttttgggatccagggtaacaacaataagagagtctgatctccctttttgtcctttagtcgcgtaatcctctattcccataaataaaatagaaaatggttttttcttcatgtctacaacttcgttgcgaagatttgatttattcccgcgggatagggcatcgtacgattcatccgcagcgttaatggttttataaagtttatacccgccaagccctacaactaccaatagtgcaagggcgaacaataacattattctttttaaaattttcctacgtttgctctttttcttttttcgcacacgcactctaacgcgttcagccattattcagtctcctttatgtgattgacggctttttcaagatacgtcaactctccctctttaatatcactctttccatttgtcagttctgtcatccattcagaaaaagcgttggtttctttttcttccacgtatgtttcgaattcaacattttctgaataatggatttcctttaacagaaattgtgactcccttaattcattttcaatcttgccaagccatgtgtaatctgcagaagtatgcatgattcgcataagcttccgttctacaacacctatatgatttaatccttcagacactgatttcccataagcgcgaattaatccgccagcaccaagcttaatgcctccgaagtagcgtgtaacgacggcgcaagtatccttcagcctgcgtttttttaaaacctcgagcatcggcactcccgctgtaccgcttggttccccgtcatcattggctttttggatatgatcattctcgccaataacataagccgagcaattatgagtcgcattccagtgctgtttctttattttctgtataaattcctgtgcctcttgttcggtagaaacacggcttaaatgacagataaaacgcgatttttctataacaatctcgtgttctcccgcttctttcacagtaaaatagctgtgcagcatgctagctgaccctcctgctaagcataaaagactgcctatacaaattcgtacagtctttagaatttttgtgcgtattttggtatcataaagagtagatagtatataaaaatgtttttttctagaatatacgcattctttcattataattcgacataatttgcagatcaattacatttataataaaaatatatgacaacgccgtgacggagggaaattatgaataaaacaaagatggattccaaagtgctggattctattttgatgaagatgctgaaaaccgttgacgggagcaaggacgaggtttttcaaatcggggagcagtcacgccagcagtatgaacagctggtcgaagaactgaaacaaattaaacagcaggtgtatgaagtgattgagcttggcgataaacttgaagtgcaaactcgccatgcgagaaaccgtttatccgaggtcagccgtaattttcatagattcagtgaagaggaaatccgcaatgcttatgaaaaagcccataagctgcaggtagaattgacgatgatccagcagcgtgagaagcaattgcgcgaacggcgggacgatttggagcgcagattgctagggcttcaggaaatcattgagcggtcagaatcattagtaagccaaattacagttgtgctcaactacttgaatcaggatttgcgcgaagttggactgcttcttgctgatgctcaggcaaaacaggatttcggcttaagaattattgaggcgcaggaagaagagcgaaaaagagtctcaagagaaatccatgacggacccgctcaaatgctggcgaatgttatgatgagatcggaattaatcgagcggattttccgtgaccggggcgcagaggacggattccaagaaattaaaaatctccgccaaaatgttcggaatgccctttacgaagtgagaaggattatatatgatttaagaccgatggcccttgatgacctaggcctgattccaactttaagaaaatatctatatacaaccgaggaatataacgggaaggtcaaaatacattttcagtgcattggagaaacagaggatcagaggctagcgcctcagtttgaggttgcgctcttcaggctcgcacaggaagctgtgtctaatgcgctaaagcattctgaatctgaagaaattacagtcaaagttgagatcacaaaggattttgtgattttaatgataaaagataacggtaaagggttcgacctgaaggaagcgaaagagaagaaaaacaaatcattcggcttgctgggcatgaaagaaagagtagatttattggaaggaacgatgacaatagattcgaaaataggtcttgggacatttattatgattaaggttccgttatctctttgactatgatttgtaaaatagagccaaaaggcatattgaccgaatgctagagtatatagaacaataatacaaggaggcgtggcttgtgactaaagtaaacattgttattatcgacgaccatcagttatttcgtgaaggtgttaaacggatattggattttgaacctacctttgaagtggtagccgaaggtgatgacggggacgaagcggctcgtattgttgagcactatcatcctgatgttgtgatcatggatatcaatatgccaaacgtaaatggtgtggaagctacaaaacagcttgtagagctgtatcctgaatctaaagtaattattctatcaattcacgatgacgaaaattatgtaacacatgccctgaaaacaggtgcaagaggttatctgctgaaagagatggatgctgatacattaattgaagcggttaaagtagtggctgagggcggatcttacctccatccgaaggttactctcaacctcgttaacgaattccgccgccttgcaacaagcggagtttctgcacaccctcaacatgaggtttaccctgaaatccgcagaccattacatattttaactaggcgggaatgtgaagtgctgcagatgcttgcagacggaaaaagcaaccgcggtattggtgaatcattgtttatcagtgagaaaaccgttaaaaaccatgtcagcaatattttacaaaaaatgaatgtaaacgaccggacgcaagccgttgtggtcgccattaaaaatggctgggtagaaatgagatagtataataggagacttgccttttactaggcaggtctttttttaggctgccgtttcccttacaatagagttataaagcaataaggcaggtatcgaagctatgaatattgcagtcgtaacagacagcacggcatatattccgaaagaaatgcgtgaacaacatcagatacatatgatccctctccaggttgtttttagggaggagacttaccgtgaagaaattgagttggactggaaaagcttttatgaagaagtgaaaaaacataatgagctcccgacgacttctcagccgccaatcggcgagctggttgcgttgtatgaagagcttggcaagtcttatgatgcggttatcagtatccatctttccagcgggatcagcggaacattcagcagtgcagcagcggctgattcgatggtcgacaatattgatgtgtatccatttgactcagagatcagctgcttggctcaaggcttttatgcccttaaagctgctgaattaatcaaaaacggagcatcatcgccggaagatattataaaagaactggaagaaatgaaaaaaacagttcgagcttattttatggtagatgacttagcccatcttcagcgcggcgggcgattaagcagcgcccaagccttcattggtagtcttctaaaggtaaagcctatccttcattttgacaataaggtaattgtgccttttgagaagattcgcacacgtaaaaaagcaatttcgcgaatttatgagcttttagacgaagatgcgagtaaagggttgcctatgcgagctgctgttatccacgctaatcgagaggaagaagcagcgaaaatcattgaagagctttctgcaaaatatcctcatgttgaattttataacagctattttggcgcggtaatcggcactcatttgggtgaaggtgcgttaggaatttgctggtgttttaaataaggccaaatctccgtttttagagcggagatttttttatattcttattttaatagttggacagaaaatattcattcaggcatactgtttcgaaaggaggcgtgctatgtgaatgtgccagttgaaaaaaacagttccttttcaaaagaattgcagcagacgcttcgaagccgtcatttgctcaggactgagctctcattttccgatgagatgattgaatggcatatcaagaatggatatatcactgctgaaaattctatatccataaataaacggagatatagatgtaataggtgcggacaaactgatcagcggtatttttctttttatcactcatctggaaagaataagctgtattgccgttcctgtgtcatgatgggcagagtgagtgaggaggttcctttatattcatggaaagaggaaaatgaatcaaactggaagtctattaagctgacatgggatggcaagctttcaagcggacagcaaaaagccgccaatgttttaattgaagcaatatcaaaaaaagaagagctcctcatctgggcggtttgcggcgctggcaaaacagaaatgctgtttcctggtatagaatcagcgttaaatcaaggactgcgtgtatgtattgcaacacctcgcaccgatgttgtattagagcttgctccaagactcaaggctgcctttcagggtgctgacatttcagcgctttacggaggaagcgatgacaaagggcggctatctccgcttatgatttccactacgcatcagcttttgcgatataaagatgcaatcgatgttatgatcattgatgaagttgacgcttttccatattctgctgatcaaacccttcaattcgctgttcaaaaagcaagaaagaaaaacagcaccctcgtttatttaagtgcaacacctcctaaagaattaaaaagaaaagcactgaacggacagttacattcagttcgcatccccgcaagacaccaccggaaacctttacccgaaccgcgctttgtatggtgtggaaactggaagaagaaattaaaccgaaataaaattccgccagcggtgaaaagatggatagagtttcatgtaaaagaagggaggcctgtttttttattcgttccttccgtttctattctggaaaaggctgctgcgtgctttaaaggtgttcattgccgaaccgcatctgtgcacgcggaagacaagcatagaaaggagaaagtgcagcaattcagagatggtcagctcgatctattaatcacaacaacaatactggaaagaggcgtcacagtccccaaggtgcaaacgggtgtactaggagcggaatcgtctatctttacggaaagcgcacttgttcaaattgcaggaagaaccggccggcataaagaatatgcggacggcgatgtcatttactttcacttcggcaaaacaaagagtatgctcgatgcaagaaagcatataaaagaaatgaatgaattggcagcaaaagttgaatgtacagactagccattatttgaaaacgtggtacagtatactcatataaccgatgatgaggagctgtaaaaatgcttgtcaattcaaaagaaatcgtaatgaaagaactgctcgaccgatatatggaccagcttcatatggcctgtacttgccaagtatgccaaaacgatgtattggcactttctttaaacaaagtgagtccatcctacgttactgattttaaaaagatcgcatatacgaaagctgagctggtagataaacaaaaaaacacagcaatgcttgtcattttggctgaatctgctgcagtagtttcagagagtccaagcgatttatgtcaaacgaagcaggaggaggcattcataaactgatctgtttattatgtgattcgcaattttctcaagatgttacatggagagccctttttttactaaagcctgatgaaaaggtttgttattcttgcagaagcaaattaaagaaaatcacaggacatatctgccccctgtgcggcagacctcaatctgttcatgccgtatgcagggattgcgaggtgtggagaacaaggatcagagacagtttgctattgcgtcaaaaccgttcagtttacacatataatgatatgatgaaagaaacgctctcccgttttaaatttagaggagatgcagaaatcataaatgcatttaaaagtgatttttcttcaaccttttctaaggtttaccccgataagcattttgttcttgtacctattccgctgagcaaggaacgggaagaagagcgcggatttaaccaggcacatctcttggcagaatgtttagaccggccttcccaccatcccctcattcgcctgaataatgagaaacagtcaaagaaaaagaaaacagaacgcctgctgtcagagtgcatttttgatacaaaaaataattcagcagaaggtatgaatatcattttaatagacgatctttatacaacaggcgccaccttgcacttcgcagcccgctgcttattagaaaaaggaaaagccgcttcagtgtcatcttttaccttgatcagaagctaaatgattctgtttttatgccgatataatcactagaaattgacacaggcatattatctaataaggagaaaaaaagatgggagaactggctaattgtccgaaatgcaatgctttatttttaaaaacaaagctgcaaaccgtatgtcaggcgtgtattaaggaagaagaaaaatcatttgagactgtctataaatttttaagaaaacaggaaaaccggcaatcaactttgagccggataactgaggaaacaggtgtggaagaagagctgatattgaaattcatcaggcagaagcgaattcagatcactcatcttcctaatttggcatacccttgtgaaaggtgcgggacatcgattagagaaggcaagttctgcaaggcttgccagtctgatattaaggatcaaatggatcatttgaaccacgaggatgctctgaaaatcgagaaagaaaatagtaaaaaagacacatactatgcctataataccaaaaacagctgattccctaaactaactgaaaacgcagtcgataaaagggttaagattgtttaaagactgcaacggaaagcgagaggaatcctatgaaaatcaatcaatttggaacacaatccgttaatccatatcaaaaaaattatgataagcaagcggtgcaaaaaactgttgcacagcctcaagataaaattgaaatttcatcacaggctaaagaaatgcaacatgcatccgacgcagtcactggttcacgacaggaaaaaattgcgcagcttaaagcgcaaattgaaaacgggtcatacaaagtagacgcaaatcatattgcgaaaaatatgattaatttttataaaaagcaataaaaaaggagaaagcccatgtcagcgaaggcaattattgaacaattgaagcgactttgcgttctgcatgagcacctgctcacgctgtctgaagaaaagacggaagcgctcaaagccggcaaaacaaaagagctttctaacattttgacaaaagagcaaaaatatattcaagcaatcacgcagacagaagatgaccggatcaaaacaacttcggcctttctcggatatagcgaaaataatactatttccgcatgtatcgccaaaacctcaggcagtgaaaaggaagagctggaacaactatacgaatctctttctcaagttctcggacgtctgaaaaaagtaaatgagatgaataggcagctgacaagagacgcgctgcaattcatctctatttcgtacgatatgctggttcctaaggaaaataacttcaattacagcaaatcaattaaagctgagctgccgaaaagtagcaaaatgaaactgtttgattcaaaagcttagcagaaaggaattcagaaaatgacatctacctttatggggcttgaaactgcaaggcgggcgttaagcgctcagcaggcagcgttaagcactactgcaaataacgtggcaaatgccaatactgatggttatacaagacagcgggtctcattggaggcaactgactatttccctgctgtatctaaaaatgcagaaaaaacagcgggacaaatgggtacgggcgttcaaggaaaatcagttgagagaataagagatatctttcttgactaccaataccgtcttcaaaacaacagtgccggatactatgacacgaaggcaaaagcgctgtcccaaatggaaggcgttttaaatgaaacggatgacagcggcttgaacagtgtgctcaattcgttttggaattccctgcaggaattatcgaataatacaaatgaagaaagtgcacgttctgttgttgctcgaaaaggacaagctgtagctgaaacgtttaattatatttctgaatcacttacaaatgtccaatcgaatttaaaagcagagctaaatacaactgtgttggatgtcaattctctgctttctcagttaaacagtttaaataagcaaattgtacaagtagagccggtcgggctccttccgaatggcttatatgaccagcgagatttgctgatcgataaattatcctcaatggttgatatcaaagtcagctacaacaaatcaggcgggaatgcacttgcatctgctgaaggaactgtatcaattgaaatccttgataaaaataaacagtcgctaggaactgttttggacggtaaaaattacgaggtttcagaacttgcagccaactatgataatgaaactgggttagtatcaagtatttcaatcggggatacagctgtgcaggcggagtcctttagcagcaagggatcccttttaggatttatagagtcttacggttatataacagcagacggccaagaaaagggcgtatacccggaaatgctttctgatcttgacaatatggcgcttgaattcgcgaaagctttcaatgaagtgcacagaaatggtgtgaccaagagcggtgaacaaggcggagacttttttgattttactggcggtgaaactgaacctgccaagggcgcggcgggcaagatcaaagtggctgacagcataatagattcaaaaggcgcaaacattgctttctcactgactggtgcagccaacgataacgcaaatgctacaaaattagcaaatgttttaaccggtaaaataaccattaacggtaaagaaactagtgttttagattattatgcgggtctgattggcgagctagggatcgaagctcaagaggctaatcgactggcgtctaatacagaaacacagctgaatgatgctgacataaaccgtcagcaaatgagcgcagtttctttagacgaagaaatgacgaatatgattcaattccaacacgcatacaatgcagctgcaagaatggtgactttacaagacgaattgcttgataaagtgatcaacggcatgggtgttggaggaaggtaggtagagtcacatgagagtaacacaaggcatgatacagcaaaactcactgagatatatcggttcaagctactcgaagctggataaactccagtcgcagatttcttcaggaaaaaaaatctcaaaagcttccgacgatcctgtagtagcaatgaaaagcttaaagtataatacgcaactgtctcaagtgcagcagtacaaaagcaatgcttctcaagcctttacctggctcgaaaacacagaaacaaacattacagaaggaattgacatcttgtcaaaggtcagagaattagcggttgaagctcaaaatgatacaaacggcgagccggagcggcaagcgattggcgtagaggtaaagcagttaaaggaacagcttttaaatattgcgaatacacaagtgaacggcagatatatctttaatggcacaaattcagataagcctccggttacagataacggagacggaacttatacaatttctgatacagctgatgtcgtagtcaatatatcaaataatatgtcattgaaagtgaattcagatccaaagtcagcttttggaggcacttctgaaagcgggcagaatgtatttgaaatgcttgattcttttgagaaagcactaaattctggttcgctagatggcatggacagtgttttaaatgatattgatcatttttctgacggcatgagcgctgaacgatctgatcttggagcgagatataatcgtcttgaactggttaatacaagactgtcagcgcaagaagaaacagctaccaaagtgttatcagacaatgaagatgtagaactggaagaagtaataactgaatttattgcgcagcaaagtgtgcacagggctactctggccgttaatgcgcaaattgttcagcctacattgattgactttttaaagtaagcggctcttaggagttcgctttttttatagttcaggaggtagagtgatgcagattcccagattgattatgcatagtgttcaaggaaaaattggtttaacaacgacgcctgccagcttaaaaatggagcagcctcaagctgatctagagatcgaacagccgagtgcggaaatggaaatatcggtgacacctggaaaactcacgattgaccagacacaagcatgggaagaattagacagaaagcatgttttcaagagaattgaagaagccgcccaacaagggcatgaggatgtaatggagggaatagcacgcactgcagaagaaggcgacgagcttatgaagattgaaaataaggggaacccaatcgcttcacaagcaaggaggaactctgaaatgcaccaaattcaattaggcgaaaattatgctccttctctttcgagggtgaaaatacaatatactccgtcacagcttgatgtgcagattacgccgcgaaagcctgttattcaggctgagccgcataagccaattgttgaatatacgccaggaaatgttaaggttgacatgcttcaataccctgatttaaatatagatgtagaatacccgaaagaatcacccgaaaagtaaaaagaaaaggatcgtgaacaatgatcattcatacgaagtaccatggccaaatgaacataaaagaagaacaaatcattctttttgaaagcgggattccaggctttttagaagaaaaacagttcgtcatacttccgctttcagaagactctccattcgtggcactgcagtccgtcacttcagaaaatcttgcgtttatcgtcgtaagtccgtttatcttttttaagaattatgaatttgatcttgatgaatcaactgctgaacttttggatatcgataatattcaagacgtagaagtcatgacaatattgactatggcagagccatttgaaaagtctactgcgaatttattggctcccattattgtgaatcgcaagaacatgatggctaagcaagtcgttttacacgactcctcatatacgacaaagcatccgattggaggagaatcatgctagttttatcgcggaaaataaacgaagcgattcaaataggtgctgatattgaagtaaaagtgattgcggttgaaggggatcaagtgaagcttggaattgacgccccaaagcatattgatattcacaggaaagaaatttacttgaccattcaggaagaaaataaccgtgcagcagcgttatccagcgatgtgatctccgcattatcctcacaaaaaaagtgaggatttttttatttttgtattaacaaaatcagagacaatccgatattaatgatgtagccgggaggaggcgcaaaagactcagccagttacaaaataagggcacaaggacgtgccttaacaacatattcagggaggaacaaaacaatgagaattaaccacaatattgcagcgcttaacacactgaaccgtttgtcttcaaacaacagtgcgagccaaaagaacatggagaaactttcttcaggtcttcgcatcaaccgtgctggagatgacgcagcaggtcttgcgatctctgaaaaaatgagaggacaaatcagaggtcttgaaatggcttctaaaaactctcaagacggaatctctcttatccaaacagctgagggtgcattgactgaaactcactctattcttcaacgtgttcgtgaactagttgttcaagcaggaaacacaggtacacaagatggtacagatcttggagcaattcaagatgagatcaaatctcttgttgaagaaatcggtggcggagcaaacgctaacggtatctctgaccgtactgagtttaacggtaaaaaacttcttaatggcgatttctcgcaagctggcggtaaatcattaacattccaaatcggagctaacagcagtcaacagctttctgtcaacattgaaagcatggcagctacagcaattggtgctttagatacagacggtacgacacttcttactggacaagcagtatctgacatcgacgtaacaaaatttaaagataatgcggctgacactgctactgtaggattcaatgctcaacttaaaacagttgatgacgcaatcaacacagtttctaaacaacgttcaaaattaggtgcggtacaaaaccgtctagagcacacaatcaacaacttaagcgcttctggtgaaaacctgactgctgctgagtctcgtatccgtgacgttgacatggctaaagagatgagcgagttcacaaagaacaacattctttctcaggcttctcaagcgatgcttgctcaagcaaaccaacagccacaaaacgtacttcaattgttacgttaattttaaaaaagaccttggcgttgccagggtcttttaatttatatttctatctccgaatcattcctcatcctgtcactaactcatgatataataaccggattctccactaactttttataaatgtatttccaaacaagaaatctaaaacagaagatttttttccaaaaatatgtgtaatcttatctccatttagtcgatataaacgatagattggggcataggggatgatcaattgaacattgaaaggctcactacgttacaacctgtttgggatcgttatgatactcaaatacataatcagaaagataatgataacgaggttcctgttcatcaagtttcagataccaatcttgctgaaatggtgggggaaatgaacaagcttttggaaccttcgcaagttcatctgaagttcgagcttcatgacaagttaaatgaatactatgtaaaggtaatagaggactctacaaatgaagtgatccgcgaaattccaccaaaacggtggcttgatttttatgcggctatgactgaatttcttgggttatttgtagatgaaaaaaagtagaataggagtggtttgagatggtcacaagaataacaggtttggcgtcaggaatggatatagatgatattgtatcaaagctgatgcagacagaaagagccccgcttgataagctgaagcaaaaaaagcagactcttgaatggcagcgtgacagctatcgtgaagtcaatacaaaaataaaagaattgcaagattatatgtctaaaaatacgttgacatatcctagcacgtatcagagcaaaactgtgacaagctctaatgagtctgtgttaactgctacaggaagcgcaagtgcaccaaactcttcttctactgttgaagtggcgagcttggcaaccgcagcaacgtataaggcaaacaattatacgggttatacacaaggcgattataatttggcatttaacgttgttgcgcctggtgagacaacggcaaaaacagtgaacattagtgtgacgagcgccgatacgattgataatgtgatttctaaacttaacagctcagatctaggagtatcagcttttaaagataaaatttggaatggtacagagtacgtagaaaccattgcgttttcttctaaagcaacaggtgcagggggcagtatacaggcagcagactctgctacagctgactttatgtccggtcagcttggtttttctttggatgctgataataagctcactgcttacaaagaaggcacaaatgccaaagtcacaattaacggctttgaaatggagaagctgacaaacaatttcacggtaaatggtgttacttactcgattaaaaatacaactgcagccacaggccctgttaccacatctgtttctactgatgttgacgggatttataaccaaatcaaagagtttgtagataaatacaatgaaatggttgacagcctgaatgaaaagctgaaagaagaaaaataccgagactatactccgttgacaagtgaacaaaaagaagccatgtccgataaagaggtagagctctgggaggagaaggcgaaaagcggattgcttagaaatgattccagcatcagcactggcacgaaccaaatgcggactgacttttatactcaagttaatgcggatgggaaaacctatcaattgacagaattcggcataacaacctcaagtgcttaccaaatgcgggggcatttagagattaatgaagacaaactgaaagccaaaatacaagaagatccgcaaagcgttgccgctttatttacaagtggatcgaacagcagcgcctatagtgataaagggattatgaaacgcatcggtgacaccctgaaaagtacggtgaagagcattgaagcaaaagccggcaactcgacaatgggaaccaatgattattcaatcggtaaaaatttaaacacgatcagcactgatattaccaaaatgcaggaccggttgaccacaatagaaaaccgctattattcaaaattcagtgcaatggattctgcgattcaaaaaatgaacgaacaagcgtcctatttatcacagcttcttgtacaataaatgtaatttggaggatgacacatggcgatccaaaatccatatacagcctatcagcaaaattcagtgaatacggctacacccggggagctgacgcttatgctgtataatggctgtttaaaatttataagacttgcctctcaggccattgagaatgatgatatggaacgtaaaaatgagaatctgattaaagcgcaaaatattattcaggaattaaattttacacttaaccgtaacatagagctttccgcttccatgggtgcgatgtacgattatatgtatcgaagattggtacaggcaaatatcaaaaatgatacgggcatgctggctgaggttgaaggctatgtaacagattttcgcgatgcttggaaacaggccattcaaagtgagcggaaggaccggcacggatcaggcgggatcgcatgaataacatagatcaactatacactgagacgaagagtatgctgtcacacatacaaaatacgccggaaagcgatgagcttttaaaacaaattgaagactttgtggctaaacggtctgaactgattcaggagatatctctgccgctttcagaagaagagcgaaagcagatgaagctagtgctgacatgggatcagcttattgtgaaggaaatggaacgactgaagcagtcaatcgcagcagaacttcagcagatgaaaagaaaacgtgtgatgcatacgacgtatttaaacccttataacaacattacgattgacggcacatattatgacaagcgtaaataggtgagtgccttgaagagcattgaagattatacgcttttatcagcttattatcatcttctttttaccattgaagaagggttgtgttatttgatagaggctgaagagaatttatcaaaaacagaaggggatcggatctaccaagatctgatccaagcctttttttatttggattcaacacattcaacacttctcttcattatggattcgcggtgtgctgaaatttgtgtgaaagcatttgaccaaatttttgcggagtttgatcaattggtctctttctcttttccctctcatgagttctgtgagtatttaaaggaacattttctgattcattatagaaaatggatgctgtctattcatcaatgtatggaaccctttttaatcaattaggcgtgtgtgaggtatttgtttcgttcaatcagcatatacatatacctccgaaccgccaataacagagcaaatacaaacaaaattcgacaaagttcactgaattttcacaaaagatttatgtttcagcaggaattgtaaagggtaaaagagaaatagatacatatccttaataaaagggaggcgttctttgatgaactataacatcagaggagaaaatattgaagtgacacccgcgttaaaggatcatgtcgagaggaagatcggcaagctggagcgctattttgaccatagcgtggatgctgatgtgaacgtcaacttgaagttttacaatgacaaggagtctaaggttgaggttacgattccgatgacagatctggcgcttcggtccgaggtgcataacgaggatatgtacaacgcaattgatctcgcaacaaacaaactggaacgtcaaatccgtaagcataaaacgaaagtaaaccgtaaattccgtgagcagggctctccaaaatatttattggcaaacggtcttggctctgatacagatattgcggttcaggatgacatagaagaggaggagagcttggatatcgtccgtcagaaacgctttaatttaaagccgatggatagtgaagaagcgatcctgcaaatgaatatgctcggccataatttctttgttttcacaaatgcggaaacaaaccttacaaatgtcgtgtaccgcagaaatgacgggaaatatggcttaattgaaccgactgaataatgaagagaagccttccgtgatgtccgcggaaggtttttgtttttcttatttgcaaattctttggaaataacaaaaggtatgatatgataatgagaggtatacatggactagtaaattatttatacatgcctttaaaataggcatgtgatgatagaggagcgttataaatgcttggaattttaaataaaatgtttgatccaacaaaacgtacgctgaatagatacgaaaaaattgctaacgatattgatgcgattcgcggagactatgaaaatctctctgacgacgcgttgaaacataaaacaattgaatttaaagagcgtcttgaaaaaggggcgacaacagatgatcttcttgttgaagctttcgctgttgttcgagaagcttcacgccgcgtaacaggtatgtttccgtttaaagtccagctcatggggggcgtagcgcttcatgacggaaatatcgcggaaatgaaaacaggggaagggaaaacattaacgtctactctgcctgtttatttaaatgcgttaacaggtaaaggcgtacacgtcgtgactgtcaacgaatacttggcaagccgtgacgctgaacaaatggggaaaattttcgagtttctcggtctgactgtcggcttgaatttaaactcaatgtcaaaagacgaaaaacgggaagcttatgcagctgacattacttactctacaaacaatgagcttggcttcgactatttgcgtgacaatatggttctttataaagagcagatggttcagcgcccgcttcattttgcggtaatagatgaagttgactctattttaattgatgaagcgagaacacctcttatcatttctggacaagctgccaaatccactaagctgtacgtacaggcaaatgcttttgtccgtacgttaaaagcggagaaggattacacgtacgatatcaaaacaaaagctgtacagcttactgaagaaggaatgacgaaggcggaaaaagcgttcggcatcgataacctctttgatgtgaagcatgtcgcgctcaaccaccatatcaaccaggccttaaaagctcacgttgcgatgcaaaaggacgttgactatgtagtggaagacggacaggttgttattgttgattccttcacgggacgtctgatgaaaggccgtcgctacagtgaggggcttcaccaagcgattgaagcgaaggaagggcttgagattcaaaacgaaagcatgaccttggcgacgattacgttccaaaactacttccgaatgtacgaaaaacttgccggtatgacgggtacagctaagacagaggaagaagaattccgcaacatctacaacatgcaggttgtcacgatccctaccaacaggcctgttgtccgtgatgaccgcccggatttaatttaccgcacgatggaaggaaagtttaaggcagttgcggaggatgtcgcacagcgttacatgacgggacagcctgttttagtcggtacggttgccgttgaaacatctgaattgatttctaagctgcttaaaaacaaaggaattccgcatcaagtgttaaatgccaaaaaccatgaacgtgaagcgcagatcattgaagaggccggccaaaaaggcgcagttacgattgcgactaacatggcggggcgcggaacggacattaagcttggcgaaggtgtaaaagagcttggcggactcgctgttgtcggaacagaacgacacgaatcacgccgtattgacaatcagcttcgaggtcgttccggacgtcagggagacccggggattactcaattttatctttctatggaagatgaattgatgcgcagattcggggctgagcggacaatggcgatgctggaccgcttcggcatggacgactctactccaatccaaagcaaaatggtatctcgcgcggttgaatcgtcacaaaaacgtgtcgaaggcaataacttcgattcgcgtaaacagcttctgcaatatgatgatgttctccgccagcagcgtgaggtcatttataagcagcgctttgaagtcattgactctgaaaacctgcgtgaaatcgttgaaaatatgatcaagtcttctctcgaacgcgcaattgcagcctatacgccaagagaagagcttcctgaggagtggaagcttgacggtctagttgatcttatcaacacaacttatcttgatgaaggtgcgcttgagaagagcgatatcttcgggaaagaaccggatgaaatgcttgagctcattatggaccgcatcatcacaaaatataatgagaaggaagagcaattcggcaaagagcaaatgcgcgaattcgaaaaagttatcgttcttcgtgccgttgattctaaatggatggatcatattgatgcgatggatcagctccgccaagggattcaccttcgtgcttacgcgcagacgaacccgcttcgtgagtatcaaatggaaggctttgcgatgtttgagcatatgattgaatcaattgaggacgaagtcgcaaaatttgtgatgaaagctgagattgaaaataatctggagcgtgaagaggttgtacaaggccaaacaacagctcatcagccgcaagaaggcgacgataacaaaaaagcgaagaaagcaccggttcgcaaagtggttgatatcggccgaaatgccccatgccactgcggaagcgggaaaaaatataaaaattgctgcggccgtactgaatagttcgccccggcaagtttactgaccgcggcgcctgcaggcgcctgcggatcttttaatgaggtgaatgaaatggaattatcagaaatcagagcagagctcgaaaatatggcttctcgtttagcggactttagggggtctctttgaccttgaatcaaaggaggcccgcattgctgagctagatgaacaaatggctgatccggaattctggaatgatcagcaaaaagctcaaacggttataaatgaagcaaacggtttaaaggattatgtcaattcgtataaaaaattgaatgaatcccacgaagaattacaaatgactcatgatcttttgaaagaagagccggacactgatctccagcttgagcttgaaaaagaactaaaatcattaacaaaagagttcaatgagtttgagcttcagcttcttctcagcgagccgtatgataaaaataacgcgattttagaactgcaccctggtgctggcggtacagagtcacaggactggggctctatgcttcttagaatgtatacaagatggggagagcgccgcggctttaaagtagaaacactcgattaccttccaggtgacgaggcgggaatcaagtcagtgacattgctcatcaaaggacataacgcttacgggtatctcaaagcagaaaaaggtgtccatcgtcttgtgcggatctcaccatttgactcatcaggccgccgccacacatctttcgtttcatgtgaagtcatgcctgaatttaacgatgaaattgatattgatattcgtacggaggatattaaagttgacacgtaccgtgcaagcggcgcgggcggacagcacgtcaatacgacggattcagctgttcggattactcacttgccaacgaacgtagttgtgacatgccaaacggagcgctcacaaattaaaaaccgtgaaagagccatgaaaatgctgaaggccaagctgtatcagcgcagaattgaagagcagcaggcagagctggatgaaattcgcggtgaacaaaaagaaatcggctggggcagccaaatccgttcttatgtattccatccgtattccatggtaaaagatcatcggaccaatacagaaatggggaacgttcaagctgtaatggatggtgacattgatacgtttattgatgcctacctgcgttctaagctttcataagctgaaaaacacacctgatgcatacgggtgtgtttttttattccttatatccttgatttcactgctgctttagcatattaccactgtatttgggtgttatttacatctaatcagggaaggattaaaatgctatcggagagcattggaagaaacggaggatatatgatggacgtacggaataaaacattgtggattttgcgggattatgtatacatattgttaggagcagcgattacggccgtgtcctttaatgtatttttgcttccgaataagattgccgccggcggtgtcagcgggatcagtacgattttacaatcatatggttttgaagcagcgtatgtacagtggattattaatatccctttatttattgctggcgtcattttgctcggcgggaaatttggactaaagacgcttgcaggttctgtgtttttgccgctagtagtgtttctgacaagggatattcagcccgccactcatcatgaactcttggcggcgatttttggcggtgtcgggataggtatcggaattggtattgtgtacttagggaaaggttcgacgggaggtacagccttggctgcacagatcattcataagtactccggtctgtcattggggaagtgcctcgccatcattgacggaatgattgttgttacggctatgatcgtatttaatattgagcaaggcttatatgccatgcttggcgtctatgtgtccagcaaaaccattgatgttgtgcaagtcggctttaatcgttcaaaaatggcactcatcattacaaagcaggagcaggctgtcaaggaggctgtcttacagaagattgacagaggcgtgacaaaaatttctgcagtcggcggatatactgacgatgaccgtccgattttaatgtgcgtggttgggcaaactgaattcaccaaattgaaacaaatcgtcaaacagattgatgagtcagcttttgtgattgtagcagacgcgagcgaggtgctgggcgagggtttcaaacgcgcttaaacgaggttataatatggaagagatcgtaaaggagttgtgcttctcaacatgaaatcaaagttatcgatactaatgattggatttgcgctttctgttctgttggctgcctgcggatcaaacgatgcaaaagaagagaaggcagacaccgacagcaagacggaagccactgcatctgaaggggaagaattatatcagcaaagctgcgtaggctgccacggcaaggatttagaaggtgtgtcagggcctaatctccaagaggtcggaggcaaatacgatgaacacaaaattgaaagcattattaaaaacggccgcggcaatatgccaaaggggcttgtagaggataacgaagccgctgttattgccaaatggctgtcagaaaaaaagtaagataaaaacatccttgccgagtgccggcaaggatgtttttatgccttgacaatatgaatgaaaagaaactgtaatagtattatgtctaaatttgacgtataatgaagtgtattgaaaaagggaactttcagatttttcatctttttacaaatgaatgggtcataaattgtcgaatgcattcgaagagtatgaccgtgtgatagataaaatgatataaaagattaggtgatttcatgatagagatgaaggaagtatataaagcctatccgaacggcgtaaaagcgctcaatgggatttctgttaccattcatcccggcgagtttgtgtatgttgttggtccgagcggagcgggtaaatctacttttattaaaatgatttacagagaagaaaaaccgacaaaaggacaaattttaatcaatcataaagatctcgcgacaattaaagaaaaagagattcctttcgtgcgccgcaaaataggcgttgtctttcaggatttcaagcttcttccgaaacttactgtttttgaaaatgtggcatttgcccttgaagtgattggagaacagccgtctgtcattaagaaacgggtgcttgaagtgcttgatctcgtgcagctgaagcataaagcgcgacaatttcctgaccagctttcaggcggggagcagcagcgtgtatctattgcaagatcaattgtgaacaaccctgatgttgtcattgctgatgaaccgacaggaaaccttgatccggatacgtcctgggaagtcatgaagacgctggaggaaattaacaaccgcgggacaacagtcgtgatggcgacacataataaagaaatcgtaaacaccatgaagaaacgtgtcattgcaatcgaagatggtatcattgtgcgtgatgagtcaagaggggagtatggttcatatgattaaaattctcgggcgccacttgcgtgagagttttaaatctctcgggagaaacacatggatgacatttgcatccattagtgctgtaaccgttacgctgattttagtcggcgtgtttttagtgattatgctgaatttgaataacatggccacgaatgctgaaaaacaagttgaaatcaaagtgttgattgatctgactgcagatcagaaggcacaggacaagcttcagaacgatattaaggaactgaagggcattcagagtgtcactttttcatctaaagaaaaagagcttgaccagctggttgacagttttggtgacagcggaaaatctctgacaatgaaggatcaggaaaacccgcttaatgatgcgtttgtcgtcaaaacgacagatccgcatgatacgccgaacgtggcgaaaaagatcgaaaaaatggatcatgtttataaagtcacttatggaaaagaagaggtcagccgtttgtttaaagtggtcggcgtttcccgcaacattggaatcgcgttaattatcggcctagtatttacggcgatgttcttaatttctaacaccattaaaattacaattttcgcaagaagaaaagaaattgaaatcatgaagcttgtcggcgcgacaaactggtttatccgctggccgtttttccttgaaggattgctgctaggcgtattcggttctgtgattccgattgcactggtgctgagcacttaccaatacgtcatcggatgggtcgttccaaaggttcaaggatcatttgtctctcttcttccttataatccatttgtattccaagtttcgctagtgctgattgcaatcggcgcagtaattggagtatggggaagtctgacttccatccgcaagtttttgcgagtataaagtgaaaaagccgttccgctttcgggacggcttttcatttgccttctttttcttctatgattacatgaaatctccatcctttacatatactatctctaggttttggtaaagacagtctggcatacaggaggagtaaaggatgaatcaaaaaataatggctgtgatagcagcagggagcatgctgttcggaggcgccggtgtatatgcgggaatcaacctgcttgagatggataagccccagactgcagcagttcccgcgacggcacaagctgactctgaacgggataaagctatggacaaaatcgaaaaagcgtatgagttaatttcgaatgagtacgtagaaaaagtagatagagaaaagctgctcgagggagccatccagggaatgctgtctacgctaaatgatccttattctgtttacatggataagcagacagctaagcaattttctgattctcttgattcctcatttgaaggcatcggggctgaggttggcatggaagacggcaaaattattattgtttctccattcaagaaatcgccagcggaaaaagccgggttgaagcctaatgatgaaattatcagcatcaatggagaatcgatggccggcaaggatttaaaccacgctgtgttaaaaataagaggaaaaaaagggtccagcgtttcaatgaagattcagcggcctggaacgaagaagcagctgtcattccggatcaagagagctgagattccgctcgaaacggtttttgcatcagagaaaaaagtacaggggcattctgtcggatatattgccatctctactttttctgagcacactgcagaggattttgcaaaagcgctgagggagcttgagaaaaaagaaatagaaggacttgtcattgatgtacgcggcaacccgggcggatatcttcaaagtgtggaagaaattcttaagcattttgttacaaaggatcaaccgtatattcagattgctgaacgcaatggggataaaaaacgttatttttcaacattgacccataaaaaagcgtaccctgtcaatgtgattacggataaaggaagtgcctctgcatcagaaattcttgccggcgcattaaaggaagctggccattatgatgttgtaggcgatacgtcttttggaaagggaacggttcaacaggctgtgccaatgggggacggcagcaacatcaaattaacgctttacaagtggctgacgccaaatggaaactggattcataagaaaggaattgaaccgaccattgcgattaagcagcccgattatttctccgccgggcccttacagctgaaagagccgcttaaagtggacatgaacaatgaagacgtcaagcatgcgcaggtattgttaaaaggtctcagctttgatccgggacgtgaggatggctatttcagcaaagacatgaaaaaagcggttatggcttttcaggatcaaaacaagctgaataaaaccggtgtgatcgacactcgcactgcagagacattaaatcagcagatagaaaagaaaaaatcagatgaaaaaaatgatttgcagcttcaaacagcattgaaatcattatttgtcaattaaaggagatggtattccgtctcctgtttctttgtgcttaaagagattatggatcataagtcacataaaaaatgagtttttgacaagaaattaaaaaaattttcacaaataaacatttataaaggactgttattacccgatatcaatatatgagagagactttctaacgagttaatatgcatttaaaatgaaacttttgcaagttgcctagtctttgtttacttcatacaatataagaaggttctaaaaagaacagtaatcaggttaatggcagctgaacgacaggtatttaaagagtaacgttagcgagaatgcttgttagcactccagtactgctgcttatactggcccgtgcttatctgtataaagaaaatgggggttcacaattgaagagggcaagtattgtgcgtgaaaaaaaatattatgaattagtggaacaattaaaagacagaacacaagacgtaacattttcagctacaaaagcactaagtcttcttatgctgttcagcagatatttggtcaattacaccaatgtcgaatcagtaaatgacattaatgaggaatgcgccaaacattattttaactacttaatgaaaaaccataagcgattaggaattaatctgacagatataaaaaggtcgatgcatctaatcagcgggttattggatgtggatgtaaaccactatttaaaggatttttcactatcgaatgtcacgctgtggatgacgcaagagagataaactctccagaggatatccaagccatttaatatttgatagaatatgagtaacatgtttggcttgaggcggtgagagatagtgtctgttcaatggggaattgaactgttaaaaagcgcgggcttgttcttcttacacccgcttttctggttttttatcatcataaccctggctttcggctatgtaagaatcaaacgggaacgaaaaacctttcatacaagaatagcagatatttatgatgatctgaaatttacatatacaaagggactgattccaggtcttcttttgtcagttattttaggtggactcggaatatcgattcctctcggtttacttgcgattattgccgttatcactgcagcggcagcgttcactcttcgcgcaaactggatgtctgctgcatatatcgtcagtgtgagtatgctgataggttttggactgcaaatatatcaggcggagccctttctggagagatttccgcaaggatttgcagttgtttggccggctgtggctgtgtttctaggtttgctgattatcactgaaggagcggttgcttatcgttctgcgcatgtgagaacatcaccggcacttgtcgtaagcagccgcggtttgccgatcggacagcagctggcaaaccgggtttggcttttgccgctgttccttctcgtgcccggtaatggtttagaatcgcaccttagctggtggcccgtgtttacggttcccggcggctcattccattttctatggattccttactttgtcggatttggacaaagggtacagggatcgctgcctgaaacgagtataaggatcacagcgaaacgcgtttgtattctcggtcttgccgtcgcagttctcggtgcagcgagcttactttggacgccgcttgcgggtgcagcggtctgtactgctttgttagggcgcatttttctgtccataaagcaaagagtgaatgataacgcggctccgttttatttctcgaaaagggatcagggcttaatggtgcttgggattatccccaatacgccggctgaggatctggaattgaaaatcggggaaatcataacgaaagtcaatggcataccggttaagaacgtttctgatttctatgaagcgcttcagcataaccgtgcatatgtaaagcttgaaattatcggtttgaatggagaaattcgttttgaccagcgagcttcttatgaaggagaacatcatgaattgggcatcctcttcgtaaaggatgaccgtgaagacgaagcagccgcttctggatcataaaaggcagcccggcaccgcaggaagatgcgatgccgggctgttttgtgttacgctgagtttttttctatccgtgctgtttcatcagatttgatgcccaatgaaacaaaaacgccgatgatggatacagcaaagagaatcataaataggatgtgatatcccgaaatcaggccgattaaggctgatgaaatgatgcttccgaaataacggaaggtcgagaaaatcccagatgccactcctgacattccggggtctactgtggcaagggatgacacctgcatgctggtcagaccgactccggaagcgagcccgccaaggataagagagagaatgaggaacaagacagaatgcgagctgcttaacagcaaaaataatagattcgcaccagccatcatggcaaatgaaagaaaaatgattttttttgctccccatttgtgatggagctgcgcgcccacccagttgctggctgacatgaagatcgaaaatacagaaagcgccatcccgctgttagatgtattaagcccaaattggttcgtcataaataacggcataatcaataagacggcatacatcatcaaattgcttaacaagactgatagattcgcatttgtaaaggttgagcttttaaacagtgcaaagtcaatgatggggtgctgggtacgtttttctcttctgaaaaaaagcggaacaaaaagaagtatcaatacactgtataccgcatatccccatggagcctcatttttcgtcagcaggataattgaaacgatgctgcctgcaagcaagagagagccgatgatatccagcggcgcgtcagatttattttctttatattgaggaaacatcgttaatgccgtaaataaagcaatggcgaggaacgggatgttgacccaaaaaatcgaatgccagctgaagctgtcaatcagtatagagccgataaaaggcccgagtgctgcaccaagtcctgcgcccagtccgaaaaatccaaacactttcggtaggcgtttttcagaaacaacatgccggataatggcaatgctgtttggcgtaagcaatgccccgccgacagcctgcaatgcccgaaagacaattaacaggagcagactcggtgaaagggcgcagcctagagatgcgattagaaaaaggccgactccccataagtacattgttttattgccgtacatgtcaccgagctttcctgcaatcggctgtgtgactgccatcacgattaaataaacggtaaccacccaagtgatgcttgcgatggactcgttatacgtatgggaaatagatgagagcgcgaccgcgatcatcgttgaattaatgggagccagaatggcccccattaatagcgagacgatcagcgcccattcttttcttgagctcattgggatcctcctttttattatgccaaggagttaatcagcagaaattcctttgacaaatagagctgtgctgtgctccagcattttttcctggggcattgatatgacctggtctcctaagtggagacggtgaatgaaataaccgaagataatcgacatgaacacgtcggcattctccgcttcatttcctgtctgaataacccctttctcacccatcgttttgagataatcaaccaatagctgtttcatagattggggatattcagtgacgtggttaatgacatcctgaaacatggccggttcacgaaagctgattttaatgatatcttttctatgttcgagctcctccaagagacaggttccgatatgaagcaggtctttgtacaaatccccttctgtttgttccaaaatgctgcctctgtttgaagaatgctgagaaagcaaagcctcaactagtccttgtttgtttttaaagttcctgaaaatcgtcgcttcacttacatttgctttttctgcaatttcttttgtagttgttgcgcgatatccttttttgacgagcagctgcatggcagcgtcaaggattctcttgtttgtcggtctcaatacgtttcacctcacgagtatactggcaggacaagtatacacccgccccgcttgtataagaaagagggggacgcatcaggaccggctgacaactgtgattttgccgctgcttccgtcaacagtgatgatgtcaccgtctcgcagtctttcggttgccgtgcgtgtgccgagaacggctggaatgccgtattcacgggcaataatcgcagcgtgagacaaaatgccgcctgtgtctgtaataatcgctttggcgtcttgaaacaggctggtccatagcggtgtggtcatcttgcaaacgagtacgtccccaggcgcgaattgagaaaattcattggcgtcccgaatgattttcaccggacctgtcgcaatgccgcttgatgccgcaatgccaaaaatatgattctctgtgtttttttcatcctctatcacagcgccgacaatttcttcagctgctttgagctgttcttttgtcggggtgccgaggtaggcaggggcttgggccagctcatactcatgaaaaatctgtctgcgtttttcagccttttcttgcagggatacagggtgaagaagcgcttgttccacttcgtcgtcatataagaaccaaaggtcctcacgatcttgaatgacaccgttttccgccagcaattcacctatcttcagcagaaagattctcgccttggcatccagcatggcgtcaatataaaagtggtgatcatcttttatatttgcagagttcagtgtccattgatagtagcggtcaaattcggtgcgcaaaccgggatcttctatgttttccaagaattcattgtataatttctctcgtttttctttcgttttctgaaattcattgtcaaaatgatagccattacggacataattttgaatattagccagagcgaaatacggattttccacccagatttgttcaatcagatcatgacttttaacagatctccatccgtattcttgcaagaattcatggacgttcttcaggaagtgtctcccctcatctgtttgttctaatttctcctggagctgttcaggcttgctgttttcaaaaatggtcaggaggttcgggttctcctgaacttccacagaaaatagccataagcaacggtccgtttccagtgatttgttcatttttcctgtcagcatctcgtaaaaatgagcgttttcggactctccttgaatgttctgatacatcgcttgcagtttgtttgttaaaaggatttgcgggaaaacgatattgaagtgctcttcataagccgtgagataaaaggcctttagtttttgaaaagcatccagtgcgctttctgcggtatgctcagtttgtgcgagctggtccagtgtccggtaaaaagggaggtatgtgtgattgatgatgtcatacatatgctccgataaaatcgggaaaagctctttgccgcagtcttcagaaggaggctgctgtccaccttggtttttggaataaatatgtccgcgataaagttttacttcatcaacaactacaccaatcggaaacttttgcatgctcttcttcaagccatattccaatgccggcacgatgaaggatgaaaataacggactcaccggaccttcaatattagactccatgttaagccagaaatcattcatatcagtgtcggtaatcatgaagctgcgtttttcttctgccgcctttttgtcctgatcaatggttgtaatcgggcgagcttgcagaaggtatatttgatgatcagcaattccaaattctatatcgacaggatatccgtacaggtcttcggttttttttgtgatttcagccaattcaatcacttgttcatctgtaaggcaaaaacggctgcgcatgtcttcactcgtttctttttcagcaattccttctgccgcagactccatgtagatttcctttgcacctatttctttctgaatctcaaacgaagatttattaacaatgaacgtgtctggggtaacacttcctgaaacaacagcttcacccagcccgtagctggcgctgattaaaagctctctatcatcatgggtaacagggttgcggctgaagataacacctgatatttctgaatcgatcagcccctgaacgactattcccattaacggctctgcgatttgattgttcatttttttcttatagctgctgacccgcccagaaaaaaatgaggcccagcattctttcactttagccagaaactcttcctctgttttgatatttaagtaggtttcatactgacccgcgaatgaggcgccttctaaatcttccgaagcagacgaagaacgcacggctacggatcgatatgattctctaagcttataaaaggaactagtcagctcatttttcagctcatccgaaaatgttccggaaatgatcccgctttcgacgttttcgctagtctcttgaagctggttgtcctccataaaacgtgcgagcgcattcgtttgaataataaacccgtccggaacaggaagaccgtgtttggtcaatttaatcaaattcattccttttgctccagccagctggctggactcttctgcctggcgaaataaaacagaatacatatttgaaacccctcttttcttcattcattttgtttttctctctagtctttttattgcggagcctgtgtttaaaaaatgatagtaaacactatcatttaattgtaggttttcaggaaaatgctgtcaaacgcagaaagtcctaaataaaatgaatagttaagttggttatattatcctgaaaaatgcggccgtactggtactgtatgcctattttcttttattctcggaatctggcggcggacttgatgatgtaataaaaaaagtgtcgctgattagaacagcggcaccatggaataagttttgaccggcaccaaaatgcaaatatggtgattgattttggctgaaaaggggtatggtgtaagtagagggagcgaatgcacgattgtccgattcttcattttttactataatcagatcagatgaagaatccctgaggagggtttttgttgattacaaaagccgtttttgcattgtttttcccttttatgcttgttgttctatttactagagtcacctttaatcattatgtggcgatcgctttaacagctgcattgctgtttgcctcttatttaaaaggctatacagaaacgtattttattgtaggattggatgttgtgtctcttgtggctggcggactgtatatggccaaaaaagctgcagagaaaaaagaagaataaatcggacataatgaatataaagactgaatacctgcttttacgttttaaaagcaggttttttatacacaaaaacagctggaaataaaaaaccaccgaactttagttcgtatttttagtgattttgctttccattgtgttactatatctataggaagatttcgttaaagaaacggaggcttatttttgtgaaagatcgctttgagttagtctcgaaatatcagccccagggagatcagccgaaagccattgaaaagcttgtgaaaggaattcaggagggcaagaagcatcagactctgctgggtgcaacaggaactgggaaaacatttacggtgtccaatttgattaaagaagtcaataagccgactctcgtgattgcccataacaaaacccttgctggacagctttacagtgagttcaaggaattttttccgaacaatgctgtcgagtattttgtcagctactatgattattatcagccggaggcgtatgtgcctcaaacggatacatttatagagaaagacgctagtattaatgatgaaattgataaactgagacactccgccacatcagctttgtttgagcgcagagatgtcattattattgcgagtgtgtcttgtatatacggcctcggttcgcctgaggaataccgggaaatggtcgtgtcactgcggactgaaatggaaattgagcgcaacgagctgctcagaaaacttgtagacatccaatatgcccgcaacgatatcgactttcagcgcggtacatttcgtgtgcgcggggatgtagtggaaatctttccggcatcccgtgatgagcattgtgtcagagttgaatttttcggtgacgaaatcgaacggattcgggaagtagatgcgctgacaggagaaattctcggcgaccgagatcatgttgcgattttcccggcatcccacttcgtaacgcgggccgagaaaatggagaaggcgattcaaaatatcgagaaggagcttgaggagcagctgaaggtcatgcatgaaaacggaaagctccttgaagcgcagcgtttagagcagcggacaagatatgatcttgaaatgatgcgtgaaatgggtttctgctccggcatcgagaactattcaagacatttgactctgcggcctccaggttcaacgccgtatacgcttcttgattatttcccagacgattttatgatcgtggtggatgagtcgcatgtgacaattcctcaggtgcgcggcatgtttaacggagaccaggcgcggaaacaggtgctcgtggatcacggcttccggcttccatcagcgcttgataaccgtccgcttcgttttgaggaatttgaaaagcatatgcacaatatcgtgtatgtatcagcaacaccagggccgtacgagattgaacatacagatgaaatggtcgaacagatcattcgtccgacggggcttcttgacccgcttattgacgtccgtccaatcgaaggtcagattgacgacttgatcggcgaaattcaagcaagaatcgagcggaatgaacgggtgcttgtgacaactttgacgaagaagatgtcagaggatctgaccgattatttaaaggaaatcggcattaaagtaaactatctgcattctgagatcaagacgcttgaacggattgaaattatccgcgacctgcgccttggcaagtacgatgtgcttgtcggcatcaacctgctgagggaaggtttggacattcccgaagtatcccttgttgcgattttggatgcggataaggaaggtttccttcgttcggagcggtcgctgatccagaccatcggacgggcagcgagaaatgcggaaggccgcgtcattatgtacgccgataaaataacgaagtctatggaaattgcgattaatgaaacaaaacgccgccgcgagcagcaggagcggtttaacgaagagcacggcattacgccgaaaacgataaataaagaaattcgcgatgtcattcgtgccacagtagcagctgaggataaagcggaatacaaaacaaaagccgcgccgaagctgtcgaaaatgacgaagaaagaacgccagaaagtcgttgaacagatggagcatgaaatgaaggaagccgccaaggcgcttgactttgagagagccgcggagcttcgcgatttacttttagagctaaaagcggaaggatgatgaacaaatggctatggatcggatagaggtgaagggagccagggcgcataacctgaaaaatatagatgtaacgattccgagagatcagcttgtcgttgtcacgggtttgtccgggtcaggtaaatcctcccttgcctttgacacgatatatgctgaaggacagagacggtatgttgagtcgctgtctgcttatgcccgccagtttttagggcaaatggataagcctgatgtggatgcaattgaggggctctctcccgccatcagcattgatcagaaaacaacgagccgcaatccgaggtctactgtcggtacggtaactgagatttatgattatctgcgtcttttatatgcgagagtagggaagcctcattgtccggagcacggaattgagattacatcccagaccatcgagcaaatggtggacagaattctggaatacccggaacggacgaagcttcaggtgctggcgccgattgtctcgggccgaaaaggcgctcatgtcaaagtgcttgaacagattagaaaacaaggctatgtcagagtcagaattgacggcgagatggctgagctttctgacgatatcgaattagaaaagaacaagaagcattccattgaggttgtcattgaccggattgtggtgaaagaaggcgtggcagcccggctgtcagattcattggaaacggcgcttcgtttaggtgaaggacgggttatgatcgatgtcatcggtgaggaagagctgatgttcagcgagcatcatgcctgtccgcactgcggattttcaattggtgaacttgagccgcgtctgttttcgtttaacagtccgttcggggcgtgtccgacgtgtgacggtctcggaatgaagcttgaagtggatgccgatcttgtcatccccaatcaagatttgtcattgaaggagaatgcagtcgccccttggacaccgatcagctcacaatattatcctcagctgcttgaggcagtctgcacccactacgggattgatatggatgtgccagtcaaagatttgccgaagcatcaactggataaagtgctgtacggcagcggggatgacctgatttatttccgatatgaaaatgattttggacaaatacgcgaaggtgaaattcaatttgaaggcgtattgcgcaacattgaaagacgctataaggagacaggctctgatttcatccgtgagcagatggagcagtatatgtctcagaagtcttgtccgacgtgcaaaggctatcggttaaagaaagaggcgcttgccgtactgattgacggccgccacattggaaaaattaccgagctgtctgtcgccgacgcacttgccttctttaaagaacttaccctttctgagaaggatatgcagatcgccaatttgattttgcgcgaaattgtggagcgcttaagctttctggacaaagtcggcctcgattacctgacattgagcagggcagcgggtacattgtccgggggagaggcgcagcgcatcaggctggcgactcaaattggctcgcgtttatccggtgtgctttatattttagatgagccgtctatcggtctgcatcagcgtgataacgaccgcttgatcagcgctctgaaaaatatgagagacctcgggaacacgctgattgttgtcgaacatgatgaggacacgatgatggcagcagattatttaatagatattggaccgggagccggcattcacggcggacaggtgatatctgcgggtacaccggaagaagtgatggaagatccaaactcattaacgggcagctatttatcagggaaaaagtttatcccattgcctcctgaaagaagaaagccggacggacgttacattgaaattaaaggtgcttcagaaaacaacctgaaaaaagtgaatgccaagttcccgcttgggacgtttacagcagttacaggtgtttctggttcaggaaagagtacactcgttaatgaaattttgcataaggcgctggcgcaaaagcttcataaagcgaaagcgaagcccggcagccataaagagattaaaggtttggatcatttagataaagtcattgacattgaccaggcgccaatcggaagaacgccgagatccaaccctgcgacatacaccggtgtatttgatgacattcgtgatgtattcgcgcagacaaatgaagcgaaggtccgcggctataaaaaaggccgtttcagcttcaacgtgaagggcggacgatgtgaagcctgccgcggagacgggattattaaaattgaaatgcacttccttcctgacgtatacgttccatgcgaggtgtgtcacggcaaacgctataaccgtgaaacgcttgaagtgacgtacaaaggaaaaagcatctctgatgtgcttgatatgacggttgaagatgctctttctttctttgaaaatatcccgaaaatcaaacgcaagctccaaaccctttatgatgttggtttaggttatattacgctcggccagccggcgacgaccttgtcaggcggagaagcgcagcgcgtgaagctcgcgtcagagctgcacaaacgctcaaccggacgcacgctctacattttagatgagccgacgacaggtttgcatgtcgacgatatcgccaggcttcttgtcgtgctgcaacggttggtagacaacggagacactgtactggttattgagcacaaccttgatatcattaagacggccgattacattgtggatttgggcccggaaggcggagccgggggcggaaccattgtcgcgtctggaacgcctgaggaaatcactgaagttgaagaatcgtatacaggccgttatttgaagcctgttatcgaacgtgacaaaacacgcatgaaatcgctcttgaaagcgaaagaaacagctacatcttaaaaccctctgttaagaggggacagcttgtcagcaagtccatccttgggcttagcaggcaagctttttctttacggcataataggtttagattcgtctttggtaaaatttctttgggaaaacgcctaaacatttacaaattgctgtcgatatatgaattgaaaggcggatgatgatttccaaattaagcagataaaccctattaaggggcttaaaggcatccttaagcaataactgaattacataggttagaagctttattggaatctgatacgtcagaaatcaaagaaaaggaagtctttgatttcaaaaacatatacacatggaggtatttttcacatgagaatcaaccacaatattgcagcgcttaacacactaaaccgtttgtcttcaaacaacagtgcgagctcaaaaaacatggagaaactttcttcaggccttcgcatcaaccgtgcgggagatgacgcagcgggtcttgcgatttctgaaaaaatgagaggacaaatcagaggtcttgaaatggcttctaaaaactctcaagacggaatctctcttatccaaacagctgagggtgcattgactgaaactcactcaattcttcaacgtgtccgtgagctagttgttcaagcaggaaacacaggtactcaagatggtactgaccttcaagccatccaagacgagatatcttcacttgttgaagaaatcgggggtggcacaaatgctaacggtatttctgaccgtactgaattcaacggtaagaaactccttaacggtgctttctcagaagatagtggtaaatcactaacattccaaattggtgctaacggtagccagcagctttctgtcaacattgaaagtatggccgcaacagcaatcggtgctctagatgatgatggtaatcttgttgctgatcaaacagtagctaaaatcgatgtaaccaaatttgctgataatgcagctgacactgcaactgtaggattcgatgctcaacttaaaacagttgatgacgctatcaacactgtttctaaacaacgttcaaaattaggtgcggtacaaaaccgtctagagcacacaatcaacaacttaagcgcttctggtgaaaacctgacagctgctgagtcccgtatccgtgacgttgacatggcgaaagaaatgagcgagttcacaaagaacaacattctttctcaagcttctcaagcgatgcttgctcaagcaaaccaacagccgcaaaacgtgcttcaattgttacgttaattttgaacggctatctctttctgatagttacagcttgccgacagagtccattaactggatgtgccggcaggctttttttgttacaatcattttgtgacagccagggaatcacttgttttttcaaaacaaaaaaggcaagatattgtcatctaacctttagctttgtttcagttataatgaatgatatgttcccgcaattacaaagtcttcttatacagctgcttacttacactcattaaatcttgaacaatatgcgtgttgctgctgtcgagcagcacttttatatattggatatcatgagagatcgggaagggtccgtgaatctgctcaagctcggcgatcatttcacgattcattcttttttgttcatgaatcagctttaacactgattcttgtgttactgtatagtcactgggatctttctccattgcttgtccagcctccttggttgccgtaagctttttacatattgtaatcggtatagccgggagattctacttctaaaactttttaaaatccaatttccgtaaatcggagcatgtctaaagaatgaatttgaaacctgaagagattttaaacgtataaataagtaaaacgtccctgatcttttgtcatggacaattcacaataggagtgtggaatgaattgaaccgtaatcaagctattattgcatcactttgttatttcagtgtgtttattgcgccaatcattgtgccgattgtcgcttattttgttgtaaatgagaaagaaacaaaacgccatgcgatacgctctcttatttctcacatagttccgtttgtcggctggctgttcctttttattgctttacttggcggagccgttgcgattgatggagacagcttgcttcctgtatttgtaatcatcgggggagcggttatttatttcttagttgtcattggcattattatttggaatgtgattcagggcattaaggtcctgcgtgcagcataagtagacaatggggaggagatcgtaatgaagcaagaaaaggaacgaatccttaagcttgttgaggaaggaaagcttacagcacaagaagctttgacactgattgaaaagcttgacagcgactacaaggaaaaagaagagaaaatcacagcgctctcagttcacgttcatgacgaggaagagccatttacaacggcaaaaaaagaaagcggcaagccgtctttaggagccaagctgtttgactggattgattctgctgtaaaaaaggtcaaggaagttgaccttgatttaaactttggccatgcgtatgatgttcagcacatttttcaatttaaagatactgatttttccagtgttgagctgcaaattgccaatggcagcgtgaatatcgtcccttgggaagatgacgatatcagagcggaatgccaggcgaaggtatatcgcgctgatagccaggaagcggcgagacacgcatttcttcagcatattgaatgtgaaatcaaaggaaataagttttttatccgtactgagaaaaagacgatgaaaacgaatgtcactttgtatattcctcagaaggagtatgataagattcgagtgaagctgtttaacggtccggtcagaggggaacatttacatgtaaaagagttctcagcgaaaacgacaaacggcgtgctgtcgttctcgcacttaacagccgaaaaagccatagctgaaacggccaacgggcaaattaagctcgccagccacagctgcggaacgatagaagcggaaaccattaacggattgatcgatctcagagggaaaagcgaatccattgacgttcaaagctttaacggaaatattgcgattaacgtaacagaatcagactgccgctccatttatgcaaaaacaacgactggaagtgtggagcttgcgattccggacgatctcgcagtgaaggcagagctgaaaagcaatcttggttcgctgtcccatgaattaatggatgttgagatgctgaaggaaaaaaatgataccattcaaaaagaaatgatgttcacttcaaatcaagcacatgatcaaaacatcaccgtcttctcagaatcactaacaggcgccatcaaactaaagtactcacagaggtgatcgaatgaataagctttatcgctcagaaaaaaataagaaaatcgccggtgttatcggaggtctcgcggaatatttcaattgggacgcatcactcctcagagtcataactgtcatcttagccattatgacaagtgtcttgccggttttgctcatttatatcatttggatttttatcgtcccgtcagaaagggatatgaaatgacatggtaaaatgggcagtcagcattttagtcaatgcattgttattaatcgtcattgatggatatattgactccatccatatcagcagcattggggcagcgattatcgccagcctcattttatcgatcttaaacgtgctgattaaaccgcttttaattatctttacactgccggtcaccatggtgacgcttggactcttcttgtttgtgattaacgccatcacgcttatgatgaccgcgtccattatgggtgacagctttcaaatcgacggcttcggcacagcgatatgggcatccgttatcctgtcggtcttccatttgctgattcaaaaaggcattttagagccgcttagaaaaaaataaaaaaagctgcccgcaaaggcagcttttttacatgtggtgctttttttgtttcgtgcgcttctgcggcgaaaacattggcggaagaaggcaaaagctcaatgcggcaaatccaaggcctaggaggctaaaggacatggcagacggcatcattgtgagcaagtaggcagataccatcggacctgctgccatgcctgtatatcggataaagttaaacattccgattgcactccctctgttgtgctcaaattcattagtaatcattgtagagtacaagggaggaataacccccatcgagatgccaaacagtgccagcgtcagagccatgagaacgagagaaacggaatgtgtaacagcaaataaaatgatgctgcaggcggcaatcacattgcttccgataaacaaggtgtgcagcccgatttttgcctgtattcttttaaacagaaacgtacctgcaatcgtgctcagcgccagcggcaaatataacagtcctgctatacccacatctatatggtaatgctctgtcagcaatattgggaggtagacaattactgcaaaataaatgaaaaagagaacaaaacttaaagtcaaaatgacgttccctgttcgatttgtaaatattgatttataatgagcgaacacattgcctttggcttgctgcatagattcagttggagaatctttaggaaaggtgatgctgtttgtcaccagcaaaacgatcgagatggccacaagtatccaaaaaatcccttcgtatccggctgctccgcctatgaatcctcctagaactggggcaatagccggtgcgacagacaggagcatttgatacgttcccattgcactcccgcgttcattgcctgtaaacagctgtccgatcgttgtggcagcaataagaggcagtgctgcggaaccggctgcctgtatcattctgaatatcagaaacaaagtaaagtcagtagtcaccgcacagccgatgctggctgctgccgttgccagaataccggtaatcaagacgatccgagcgcctttaaaatcaatgatcgctcctaatataatttgcattattgctgtcacaatcataaaaactgagactgacaggttcaccatagctgtggaaacatggaatgattctttaatgatcggaagaataggtgaataaatgttctggcttaaagatgcaaaaaatgcactgaagcaaacagtgtataagatcaatactgcctttgattttgtatgagccaaagtgtacaccgcctttttgtttactttacaggtttgtctggagtcccatcggtttgttctgcttcaagtgttgacgtcaactgctctagaaacttcaatacagccttttgttcttcttgtgaaaatgaatcgaggaattggtaaaaagccagctccttttttttatgcagtttctcatgtaagtcgaaaatccgtctgcctttacgggttaatttaaaataaacttcttttttgttatctgtcagctgatagctgttaatgaattcttccttgatcagttttgtgctgattttcgttacattcgctttcgataagttcatttttctggcaatccccgcattgttaatgggttcatgctggccgatgcagtcaatgacgtgaatgcttgtcatatttttgggaatttcagctacatcctcttctgcggcctccttaaaaaattgctgaagtgaagtgttcgctttttgttcattaaggtgcagcagtctcacgtatatgtcgtatatcatctgttttgtcaaatcagacataggctaccttctttcttaggaataatagtttacgatgaaacaataaaacaaatcgtttactggtgaacaattttattttatcttttcttgttttcgttgtcaattgttggtgtttagactatttgttgatatgtcatgctgaatatgcgtgtaaaaagtgtgtggaaaatgtgatgtttacatttattttcaaatatttgggcacagatcatattgacgtttggaaggaaaagggataaaatgactaatgtttactagtaaacatttatcatgatatgggtattgaaaatgattattaaaatcttaaaaaacatttggaaactttaagtgatgcctgccattcgtcttgttcagttgttctagctattccatcttgtatttgagggtgatgacttaaagcgggataagttttaggggtgaatgagatgaccggaatggtaacggaaagaaggtctgtgcattttattgctgagccattaacggaaaactgcagagaaatatttgaacggcgcaggcatgttttggtggggatcagcccatttaacagcaggttttcagaggattatatttacagattaattggatgggcgaaagctcaatttaaaagcgtttctgttttacttgcggggcatgaggccgctaatcttctagaagcgcttggaactccgagaggaaaggctgaacgaaaagtaaggaaagaggtatcacgaaacaggagatttgcagaaagagctcttgtggctcatggcggggatccgaaggcgattcatacattttctgattttatggataacaaagcctaccagctgttgagacaagaagttgaacatgctttttttgagcagcctcattttcgacatgcttgtttggacatgtctcgtgaagcgataatcgggcgtgcacggggcgtcagtttgatgatggaagaagtcagtgaggatatgctgaatttggctgtggaatatgtcatagctgagctgccgttttttatcggagctccggatattttagaggtggaagagacgctccttgcttatcatcgtccgtggaagctcggtgagaagatcagtaaccatgaattttctatttgtatgcggccgaatcaagggtatctcattgtacaggaaatggcgcagatgctttctgagaaacggatcacatgtgaaggatgatagggggagtaaaacatgagccaatcgattaaattgtttagtgtgctttctgatcaatttcaaaacaatccatatgcttatttttcacaactgcgggaggaagatccggttcattatgaagagtcgatagacagttattttatcagccgctatcatgatgtccgctatatccttcagcatccggatatcttcacgacgaaatcacttgttgagcgtgccgaaccagtcatgcgaggccctgtgctggcccaaatgcatggaaaagaacactctgccaaaagaagaattgtagtgagaagctttatcggtgacgcactggatcatctgtctccattgattaaacaaaatgcagaaaacttgttagcgccttatcttgaaagagggaaaattgatctcgtcaatgattttggaaagacgtttgcggtgtgcgtcacgatggacatgctcgggctggataaaagagaccatgaaaaaatctctgagtggcacagcggagttgccgattttatcacgagtatctctcaatctcctgaagcgcgggcacattcgttatggtgcagcgaacagctttcccaatacttgatgccggtcattaaagaacgtcgcgtcaatccgggatcagatttaatttcgatcctatgtacttctgaatatgaaggcatggcgctgtcggacaaggatatactcgcactgattcttaatgtgctgttagccgcaacggaaccggctgataagacgctggcactgatgatctaccatttgctcaacaatcctgagcagatgaatgatattttggctgaccgttcgttagttccgagagccattgcggagacattgcgttataaaccgccggttcagctgattccgcggcagctgtcccaagatacagtggtcggcggtatggaaatcaaaaaagatacgattgttttttgtatgatcggtgcggctaaccgggaccctgaagcatttgaacagcctgacgtgtttaatattcatcgggaagatcttggtatcaagagcgcttttagcggcgccgcccggcatctcgctttcggatccggcattcataactgtgtaggagcagcttttgccaaaaacgaaatcgaaattgtagctaatattgtgctggataagatgcggaatatcagattagaggaagatttttgttatgctgagtccggtctgtatacacgcggacctgtttcacttctcgttgcgtttgacggggcataatagaattccaaaggtctctcccatgcgggtgagactctttttacatatatttgatccacaagttgaaaaacgcagtcactgtttttaaatcatcaattgaaaattcattgaaaagctgtttatattgctcctttgctttctcatgaagctgttcatgtaatgccgccaattttctgccgctatcagttagcgtataaaaaatttcttttttgttgccaggcttttttgtcactgtaatgatattgtgtttcaacaaagcatgaaccgcttttgaaacagcggcttttgagatgtgtaaacgggatgctaagaagctgttgttcacattttggctggtatgtatgcaggaaacaatgtgaagctgggtcaaagtccagtcttttttgaggtgatcgtgatgttgtgaggatatgccaatggatggtatctgcaccttttgccagacgcgtttatccctttttaatgcgaattgttgtatagcttgaaataattcatcatgaatgctgttgtccatcaatttgcctctctgatttaattgttaactggttaactattcttagtttactgggtaatagtggaattttcaagagacagacgtttttttgttctttatgcacaaaaatgaactcataagcttccctgttcagacgcaaaatacatgaaaagggaggtgctttgatgaggaaatacacggttattgcttctatattactgtcttttctttccgttttgtctggcggccatcatgaatcgaaagcttttcctgttgtacagcaggaactatttcaaacgcctcattacatacccttgcttgaaaatcctcctcaaattgatgtgaaagctgaaatgagaagcaatctaatgattgaggctcaagttcgcgataattcgtatcaagcattttccgcctttcttttttataaacaaagtaatgagctgggctacaaaatggtgccgatggacccgacccccggagcggtccgcaagtttttggcacaaattccgaaacgtttgatttggaacagcgagcttgagtattacattgtgatgtcgaatgggaagcagcgggttgagtcggagacgaagaaactgaagcttgaaggataccaggctgaccttgcccatattccggagcttctgatcacagagctggcggttgatacgaagaatataggacgcgcagacggttatgaatttattgagatttttaatacgactgacagaacgattgattttaaagactaccatatccgttaccgctacccaaaagaagggcctgactccgatctgatttggagacctgatgaaaggatcttgataccatccggcgaaacgtttgtcgtctggctgaagcctgccgggcatccagaattgacgtcagcggatttcaatcgttattatcagacacaactaaaagaaggaaaaaatcttgcggtgatagacgagacagagggtatggccaatacgaggccgcgggccgttgtgatatcaacgaatacaggaaaggacatttcggttgcgcattatcggaaacatgcgctgcgtcggctgtcatcagtgctttataagtatccactgaacggaacagcagaacttctgaacatttcaatcggggaaaagaatccgtctcccggaaccgtattacaggcacaggtgcccgaccagaaacggaaaatcaagctcgataaagaaaagccggttattgaggatttgactgaccgcaagcctgtccgccctgctgaaagcattgagctgcgggctgacatacgggaccgaagtctagtgaaaacagctgccttttactaccggacggatgagaacaaaccgtttaagcgaattcttgctgaaaaagaccgtaacgataatctctaccattatattgtgtattcgcctgaattgatcgggaaggatcaactagagtattatgtggcggccggggacgggatcaatgaagcgagaacgccggtcaaaatgattgatattaaacaaacaagcaaggcgcacggtctgcggttgaatattgaaaacagagacacgctgtcgggaactcaatttctcaaagccacgacagaagggcgagctgaccgcattaagctatggattgacgggagaaaacaagtgacagagcccgcgatggaaaaagaagtatattttgcattcgatacgaggaaaacgaacctttattttaaaaacgcggtaacgatggaaggcaaagtgctgaaggtgttcgatgatacaacaaataaataccgcacctattctgttccattgccagagacactgcttcggaaagggaagcagctgcagcgtattacgatacgttcaggttcgaaggtgtctccgtttgatactgctgaaaaccgtgatgacttcttagtcaaaaacgcccgattggtgttatcagatggaacggtgatcagggatcagagggtgtcccctgagaaggaactctttattggcgataatcagcgctcaaataaaagctggcaatttcagttcaatctgcctgacggactatttacatcacagctgctggagtgggatacatcaaagctttctgaaggcgctcaccatattcaagcaagcgacgggaaggaaaatgtcagcctggttgtacgggtagataattcaggacctcacattgagccgaatatcaccgaggggcaaacgtataaaggaaaccttatcctgcaggcggatatgtatgataaatggagcagaattgaggaagcggaggcgtcgttagatggagaaagcattacactcccatatcatacgtcatcttctgaccttttgccgggaaaacattctctaaaagtgacagcaacggatctcgcgggcaataaaacagtgattgagaggatatttaaaaccgaacgagagcatccggaccagccggaggttatagacagcgaagccgacacgcataaggccaagatttctgtacgggtgaaagatccgacgaatgatgccatggatgttggtttttataggggatttcaatatacagcgcgcaatcatgtgaaaatatttaagcacgcgtcactgactgaaccgccgaaaagctttgtgccggaaagggagaccccatttacgaataaagaattggagcgggtatcagctgctgatggaaaaacagtatcgacagaaaacaaagagcttttcccttatcatcgctttgaagtgacggttgatccatcaattgatgagaatgatctggcagaagcagtctggaagggcagttctttgccggggagaaaggtgacgatgtatgcttggaattatcggacaaacgaatggcagcctgttgacagcttcgtagcgaaggatgacaaaccgtttacgctgaaagcgtctgtgattgccgccgattttgtacgggagtcgaaaatgaatgtgattgtacaggatgaaattcctcctgcgaaggatatgtacacatttgtctggatgtctgatacacagtattacgccgaaagctatccgcatatttttgataaacagaccgaatggataaaagataatcaaaagcagctcaatatcaaatatgtgttccacacgggtgatattgtagatgattccgccgatatcagacagtggaaaaacgctgatcggtcaatgtccgttctggataagagcggaattccttacggcgtgctggccggcaatcacgatgtcggacataaggacggctcctacagggcgtttggcaaatattttggcagcgatcgttttgataaaaaattgcattatggcggttcctataaaaataaccgcggacattatgacctgatttctagcaacggcaatgattatatcatgctgtacatgggatggggcattacggatgaagacatcgcgtggatgaatcaggtgctgaagaaacaccctgaccggatggccattttagcttttcatgagtatttgctggtcagcggaaacagaagcccgatcggagagaaaatattcaaagaaatcgtaaagccgaacccgaatgtcgtgatggtattgagcgggcattatcatagtgcgatgagaaaaacagatgagctggatgatgatggtgatgggaagccggatcgtcttgtgcatcaaatgctggccgattatcagggcgggccagaaggcggtcaagggtatttgcgtttgcttcaatttgaccaggccaatgacatggtgcacgtatctacgtattctccgtatgtaaaggataagaattactatgatacggatacctatggcaacaaggatgaattttccctttcgcttgatttgaagccaagaatcaaaaaggtggaaaccgattattttgaatgtaatgtatataccaatgaagagctcggaaaacgggagcaagtgaagagcggggatacagctgaattccgctgggatcaccttgaaccgcagtctgtttattattggtacattatagtggaagacagttttaacggcaaaacgaaatcaccgatctggaagttcaagacgaaaaaagaaacatatcgtccggcaccagaccagtttgattttcgccatgtctccaatccttaaaaagggttggaggctttttttatgaaagacgatccatatagtggacaaatgtataacggtcgcctctgtatacggattttgcatgctcaaaagcagttccgttctgcagatatgttgttcgtttaattaataggactggcgctcccttttgaataccaagaatgttcgcttcttccgtggtggcagcgcttggctcaagctcctgttttgcacgggaaatcggtatgctgttgtacctttcaatatgatcatagatcgacgactgaaaatgcgattcgttcaattcacccgcaagctcaaacggaatatgtgaggactcaatcgccattggaatatcatttgccagccgcacccgagtgattttatggatagaggaggggtgcccgcagcctaatatagccgcgagctcctcagttgaatcaataagctgataatcaatgagcctgctgcccggtgtcatcccgcggcttttcatatcctcggtaaagcttgtcagcccttgaagtgcttgttccatttttggcttgctgacaaaggtgccccgccctttcaggcgatagagcaagccttcattaactaaattagaaagcgcctggcgaactgtcatccggctgatcccgaattgttcggcatattcgcgctcagaaggaagaggcatatccggctgcagctctccgttcttaatttgggtttttaattgctccataatctgatagtaaatcggaataggcgattgtttattgatattcataagtcagcatgttcctttcaaggtcttaatgacgcggcttcacgatcaatcaaaaccgtaacatcggaatgcaggtgcaaagcagatgcgggaaaatcttcgcttatgtttccttctaacagcttacgaacagcttccgctttgctttttccagaaataagcagcagaatgcgcttgcttgagagtatcgtttgaattcccattgtcagtgcttttttcggcacgctgtctatggagggaaaatatctggcattcgcttggcgggtttgctcatttaatgtcacaacatgagttcgcgatttgaaagacgttcccggttcgttaaagccgatgtgtccgtttcggccgatgccgagaagctgaatgtcagtgccgccgagggactcgactagctgttcataccgtctgcattcagcttccaaatcgtctgcatttccattcggaataaaatgccggctaggcttgctgtcgatatgctgaaaaaaacggtcgttcatatagaagtgatagctgttcgggtcatcgcttgaaagtccggcgtactcatccaaattaactgtagtgacgttttgaaatgagagattctcagtttggtgcaggcggatcagctcgcgataagtgccttccggtgtgccgcctgtcgctaacccgagaacggcatcaggtttttctttgattgtatctgccgttattctggctgctttttggcttagctcttcatacgtttgacattccattactttcatatctggtcagcctccttggatataaatgcaatgtttccgcggcaaatggtgagaatcacctcgcaatcactgctgacaatcactaaatctgcatcttttcccacagtcacactgccttttcggtcaaagatgcccagctgtttggccgcgtttgcagaagttatattagctatatccgtccaagagcaatttgtaaactcacgcatatgccgtgcaccttcgttcattttgaggatcgaaccggcaagggttccgtctgaaagaagagctgttcttcctcttaccgtcacactttggccgccgaactcatatacgccgtctttcagtccttttgccctcatggaatcggtaattaaaatgagcttgctgctgcctttcgccaaaaaagcaagcttagccgctaaaggatgggagtggatgccatcggctattagctctgtcacaaacccatcatgggccagcgccgttccgatcactccgggttctcggtgatgaaacgggctcatcgcgttgtacagatgggtcatatggctcgcccctgcttttgcggcatccgacagcattgcggaatcggcatccgtgtgccccatggacgcgataatcgattcttctttcaaatggcggatcagttcaaaatgctgatcctcctccggcgcaagtgtaacaattttgatcagtccgcccgcctcctgctgccactttttgaaaagcgcaacatccgaaggcctaatccactcttttggttgcgctccggctcttttaggtgaaacaaaggggccctctaaatgaatgccgagcagttctgcacctaataaagaggactcttcagccgctttccactctcttgcgttcaccaaagcttgagaaatgttcccatgctcttgggtaatcgttgtggctaaaaagctcgtcgtgccttcttcgggcagtcttgacgacatgatgtcgagcgtggaaaagctagcatccattgtatctgcgccatagccgccgtggatatgaatgtcaatcatgccgggaagcaaaacggaatccgcaggtgcttgaatctcttttgaatatgactccttgggccgttctgttgagactgtgctgatttttccgtcattgattccgacatagccgtttttgattacttcattttctgtcacgatcgcaatgtctttgataagaagactctctgccatagatgatccgcctttctggaatttgaatacctttattttactctttttcagactagtgatctagaccagctgaggtgttttcccgccttttataaaatctgttttaggttcaagcctgaaagtgataaaatgaaagtattgtgagcaagctcggggcagcccggaacaggaggaacatatcgtggcaaaggttcgcacaaaagacgtaatggaacagttcaatttggaattaatcagcggagaagaaggaattaaccgcccgattacaatgagtgacctatcaagaccaggcattgaaattgccggatattttacatattacccgagagagcgcgtgcagcttctcggaaaaacagagctttctttctttgaacagcttcctgaagaggagaaaaaacagcgaatggattctctgtgcactgatgtaacaccagctattattctttctagagatatgcccatcccgcaggagctgattgacgcctccgagaaaaatggggtgcctgtcctcagatcgccgctgaaaacgacaagactgtcaagccgtttaaccaacttccttgagagcaggctggcgcctaccacagcaattcatggtgttcttgtcgatatatatggtgtcggcgtgctgatcacaggaaagagcggcgtcggaaaaagcgaaacagcgctggagcttgtgaaaagagggcatcgccttgtcgccgatgattgcgttgaaatacggcaggaggatcaggatactcttgtgggaaacgctccggaattaattgagcaccttcttgagatcaggggccttggcattatcaacgtgatgacgctatttggcgctggcgcggtcagaagcaataaacgaatcacgattgtcatgaatcttgaactctgggagcagggcaagcaatacgaccggctcggacttgaggaagagaccatgaaaatcattgatacagaaattacaaaactgacgattcccgtccgcccaggccgaaatcttgcagtcatcatcgaagtggcagcaatgaacttcagattgaagcggatggggctgaatgccgctgaacaatttaccaacaagctggcggacgtcattgaagacggtgaacaagaagaataggagttggcgttaaatgaatgaagcgatagaaccactcaatccgatagcatttcagctggggccgttagccgtccattggtacggaatcattatcggtctcggcgctttgctcgggctgtggattgcgatgagggaaagtgaaaaacgggggctgcagaaagatacgtttattgatcttgtcctgtttgccattccaattgcgattatttgcgcacgaatttattacgttgcctttgaatgggactattatgcggcacatccgggagaaatcattaagatttggaagggcggcattgccattcatggcggattaatcggcgccattttaacgggttatgtgttttcgagagtgaaaaaactttcgttctggaagcttgcggacattgccgcgcccagcattttgcttggccaggcgatcggccgctgggggaacttcatgaatcaggaagcgcacggcgaggctgtcagcagagcctttttagaaaacctgcacctgcctgaatttatcatcaatcaaatgtatatcaatgggcaatattatcatcctacttttttatatgaatcactatggagttttgtcggcgtcattgttttactgctgcttcgcagagcgaatttgcgtagaggcgagatgttcttgatctatatcatttggtattcaatcggaagatactttattgaaggaatgcggactgacagcttaatgctgacagattcacttcgcatcgctcaggtgatttcaatcgtattgattgttttggctgtggcagccatcatcttcagacgcgtcaagggatactcgaaggagcggtacgcggagtagacgtcaacaaagggggatgaggcatgaagaaaatctttctggccggtcttgcagcaggttttcaaacaacatggacgctgggtaaagtgattttcccggtaacgctattggtcactttgcttcagcatacccctgtcatggattggcttgtacggctgatcacaccggtaatgggtctcttcgggctttctggtgaagcggccattccgcttgtactgggaaatatgctgaatctgtatgcgggaattgccgggattttaacattggatttatctgtgaaagaagtctttattttagctgttatgctttctttctgtcataacttgattatcgaatcgacagttgccgcaaaggttggtatcagaattggcgtcatattggccgtgcgcatcggtttggccgctgtgtcagccatcgtcatcaacctcatttggcatggcggaaaggaaacggcgcagtacggttttatcgctgcgaagagcgccgcgccagacagctggctaggaatgttggcagaagcattaacgaaagccggacttggtgttttgcagctggcggcaattgtcataccgctgatgatcatcatccagtttttaagagatttaggctggctgcatcggttctccaggtggctgtctccgtttacgcagctgcttggcatgaataaaaatacgtctatgacaatggtggcgggactgacaattggtctggcctacggagcgggtgtcatgatcaaagctgtcgaggatgacggcgtgagcaagcgggacatgacattggcatttatatttctcgttgcctgccacgcggtcgtggaagatacacttgtctttattccgcttggcataccggtctggccgcttcttttgattcgtgtcaccacagcagttctgctgacaatggctattgcgcacacgtggaaaaaatggaaaccctcagcggttggaaaggaagcaatatgagtgacaaacaagtaacgacgattctgtttgatttagacggaacgcttattaatacgaatgaattaattatcgcgtcctttttgcatacactggagcattattatccgagcaagtataaacgagaagatgtccttgcatttatcgggccgtctctttttgatacgttctcttcgatggaccctgataaatgtgaggatatgatcgctatgtacagagcgtacaatcatgacatgcatgattcactcgtgactgaatatgaaacggtatatgagaccctggatgcattaaaaaaagccggctttacattaggaattgtgacaacaaaattaagagatactgtcaatatgggcctcaagctcacgggaatcggcgaattctttgaaacagttgtcacccttgatgatgtgacgaatgcaaagcctgatcccgagcctgtgctgttagcgctgaaacagttaggaagcaagcccgaggaagccattatggtcggagataattaccacgatgtgctggcaggcaaaaacgccggtacaaaaacggcaggagtcgcatggacgattaaagggccggaaatgctggcgaagcatgagccggattttatgcttgagaaaatgagtgatctattacaaatcgttggagtgaagtaatctgtgagaaaaacagatcgtcatccggtctcgggggccaactcactgtggcatgtctatcaaacggtaccttttctaaaggtcgtcaaaaatttcattgtcattcaaattgcgagatatacgccgtttatagggatgaaaaactggctgtaccgtacatttctgcggatgaaggttggaaatcagacatcctttgccctcatggtgatgccagatatcatgtttccggaaaagatctcagtcggaacaaatacaatcatcgggtacaatacgaccattctggcccatgagtatttgattcacgaataccggatcggcaaagttctgatcggagacgaagtgatgattggtgccaacacgaccattctgcccggggtgaaaataggagatggcgcagttgtgtccgccggaacacttgtccataaagacgtgcctgccggcgcatttgtcggcggaaatccgatgaggatcatctatacgaaggaagaaatgcaagaaagattgaaaaagtccgctgaataacatcagcggactttttttgttaaaattgagtgttgttgttttcgtaaatatgctgaacaccaatccatttttgaccgacattagagtagcgtgtatttgtcattctgaccgtgcttgttttgctgtccgtccggaatatcgcttccttcatgtttgtgatggtgcacttatcgatgatcacatcaacgtggaaggttgaaccgccaagctgtcttatgaactttccgccattgtctgccgtgaagtttttcactgtgaatgtactggctttattgatttggaatatcttatctgacgctttttgagcagaaccgccgtcgatcgtcacttttccttccttcttcaccgttaacgcatcctcaccaacatcttcccatttcacattctgaatgttaacgtttccataagtgtgcacgccatcagcggcaggtgcaccaagcaccacatttttcagggttgctccatcttccacacgaaaaacagggtcttggttttctgactggcttccgtcgcctaattctttccctgccacaaaccgctgtcctttcccgtcatatgttgtattttttggtacgataattgtttcgtgcaccactttgtcagctgcaaaaacggttgatggctgaaactggctgaaacccataaccaaaccgaacataaataggatagacacgatttttttcaatgataaatcctccccggaaatctttcattttttgcaagagaagcgtcagcgacttgcaccggcttctctcgcatagatcggggcaaggctgaatctgctttaatcataaaaacagacagcctgaaagtaaagacaattttgggtgaaaaatggaaaatgaatcgatcttaccgattgatacaaaaagcatgaatattgtcgtatttgctcaggatagagcatagtgaggcttcaggtgtttacttttgaataaccacggcctggctgcccatttgtttccacgctttttcaaagcttgttctatcggtttttctgtttttatagccatacggatcattgagatacacatatttatcatcatatcccgtaacggcgacgctgtgttcgctgtacgtaatttctatcgttccgtttggcgttttccatgtctgcatgttgtcaactggcgtaaagttggctgtcgtaataacccaaactggattgcctttttcaagctgctgataaacagcggaaatactttttccagtcagatcagacactttgtctcccgcataggttttcgccagctgatagatcggtcgatggtagacaccgagaccagggccattcgccatatccccgacaaatccgtcattcggatcaccctttaatccgctgctgtatgtcaaaggcactgtggcaacctgatttgccagggtattttttgtcacgtcgtatcccgcataattcagcaccatcgcaaggcttgttacttcacagccgttatagagccgaggtgcgtccatttgattgtaaaggatgacatccagcggttttgcgcttcccttcagctcctttttgctattcgcagctgagtctgtatcgctatcagaaaccacttttttaaggctgttcaaaaaaggaatatctatatcttttgcatctattttaagtccgaaaaaaataacgcctgaaagaatcatcaggacacatagagttcgcagtgttttcatctttatctccttgttctctatttgatttgtattatagcatgccaaacataaagaatttgagatattacgtacctttaatacattattcatgattttttcataatgaggagaaggatatttgaactaaaaatatccttactgaagttaagcgttgattttcattctttcatctgctaacatattatcatattagcaaactaaaggattcggaattttccttcataagataacagcggaggtgctcgggttgatgtttatgtttgaaaaaccgcacggcatgagagatacactgcccggtttatacgaaacgaaaaaaaaggtgagacgatcgttaaccgatttgattgataaatggggatatcaatttatggaaacgccgacactggagttttacgataccgttggcgtccagtcagcaattgaagagcagcagctgtttaagctacttgatcaggacggcaagacattggtgcttcgcccggatatgacggggccgattgcaagggtggcggcatcgaagcttctgaaacacggtcatccgctcagagtcggctatgcggcaaatgtattcagggctcaggagcgtgaaggcggacgtccggctgagttcgagcaggtcggagtggagttaatcggtgacggcacgacgagcgcggatgcggaggtcattgctttagtcgtcggggcattgaaaaacgctgggctggcatcctttaaaattgccattggccatgccggcattgcggatgctttgtttgttgaggtgctcggaaacgttgaacgagctgatgtgctgcggaggttcttatatgaaaagaactacgtcggctacagagagcatgtcaagtctctcccgctttcctccattgataaaagcaggctgcttgagctccttgaactgcggggcggtatagaagtatgcggacgtgccgaggaaatcgtcgattctgcgcaaggaaaaagcgtggttgatgagctgaaggcgctgtgggacattcttgaggattacggatgtacggaaaatgtccgcctggatctgaatatggtcagccacatgagctattacacagggattttatttgaagtgtacgccgagaatgtcggttttgtcattggaagcggtggccgttacaacaagctgctgggccattttgattcacctgcaccggcaacaggcttcgggcttcggatcgaccggctgattgaagcccttcatatgaaagaagaaccttgtgatatagacgctgttattttcagcaaagagcagcgggcgcaagccatcgcttatgcgaatgaagaacgcatgaaagggaacaaagtggttcttcaagatttatcgggaatagaaaatatcgaccagatgacaaaatcttttgcaaacgtcacttattttatcggtgccagaaaggaagagcaaaatgggtaagttactcacaatggcgatgccaaagggccggatatttgaagaagcggcagggttgctgaggcaggcaggctacaggctccctgaggagtttgaagattcgagaaaactgatcatcgatgtgccggaggaaaatcttcgtttcatattagcgaagccgatggacgtaaccacgtatgtggagcatggcgtggcagacgtcggaattgcgggcaaggatgtcatgctggaggaggaacgcgatgtgtatgaggtacttgatttaaaaatcagcaaatgccacttagctgtcgccggacttccgaatacagactggagcggcgtagcgccaagaatcgcgacaaagtatccgaatgtggcttccagttatttcagagagcagggagaacaagtcgagattattaagctcaacggttcaattgaactggctccgctcattgggcttgcagatcggatagtggacattgtttccacaggacagacgctgaaggaaaatgggcttgttgaaacggagcacatttgtgacattacctctcgctttattgttaacccggtaagctatcgcatgaaagacgatgtgattgacgaaatggcatcccgcctatctctcgttgtggaaggagagacggcaaaatgaagatcaaaaccatcagcggagcggaacggctttctctcaagcgttccatcgatgccggaacggaagagcaaagaaagacggtccggtccattattgaagatgttaaagcaaacggtgatcaggcggttcgcagctacacggcgaaatttgacggcatcgaaatagacagcccgctggtcacaaaagaagaatttgaggaggcatacacctcactggattcacgtcttcttcaggtgattaggcaggcaatcgaaaatattagggaatatcacgaaagacagctgcaatcctcctggttttatcacagaaaggacggcacaatgctggggcagaaagtgacggcgctggattccgccggtgtatatgtgccggggggaacggccgcatatccttcatctgttttgatgaatgtgattccggcgcttgtagcgggcgttgaaagaatcgttctcgtcacgcctccgggaaaagacggtctgctgtctcctggagttttggttgcagcagccgagctgggcataaaagatgtttacaaaatgggcggcgctcaggcgattgcggcgttagcatacggaacagaaaccattgagccggtggataaaatcacgggtccgggcaacatttatgtcgcgcttgccaaacgagaagtgttcggcgatgttgatatcgatatgattgccggaccgagtgaaatcgtcgtgctggctgatgaaacagcgattccgagcgaaattgcagccgatctgctgtcacaggcggaacacgataagctcagctcatgtgtgtttgtcacagattccatggcgctggccgaggcggtttcagccgaggtgagtaagcagctgaaaaccttgccgcgaagagaaatagcggaagcttcagtgagagattacggttgtatatatgtggcggaaacaatggtggaagcgattaatactgtcaatacactcgcgccagagcatttagaaatcataacacagtctccggaagctttgcttggcagtatcaaacatgcgggtgcaattttcttaggcagatacagccctgagcctgtcggtgattattttgccggaccgaaccatgtgcttccgacaaacggaacagccagattttcaagtccattaaacgtaactgattttcaaaagaaatcgagcattatttcttacagtcaatcagcctttgaagaacatgccgaaagcatcgcggcttttgccagactggaagggttagaagcccatgccagatcaattgatgcgagagaacggaggatttctaaatgagaaaagcggaacgcgtcaggaaaacaaacgaaacagatattgaactggcatttacaatagacggcgggggacaagcggatatcaaaacagatgtgccgtttatgacacatatgttggatttattcacgaaacacggccaattcgatctttccattaacgcaaaaggcgatgttgatatagatgatcaccacacgactgaagatatcggcatctgcttagggcaggcgctgctcaaagcgttgggcgataaaaaaggaatcaaacgctacggatcggcgtttgtgccgatggatgaggcacttgctcaagttgtgattgatttaagcaaccggccgcacttagaaatgcgcgctgatttcccggctgctaaagtcggaactttcgatacggagcttgtacatgaatttttgtggaagctggcgctcgaagctcgaatgaacctgcacgtcatcgttcattatggcacaaatacccaccacatgattgaagccgtttttaaagcactgggacgtgcgcttgatgaagcgacaacgatcgatccgcgagttaaaggaataccgtcaacgaaagggatgctgtaaatgatcggcgtgatagattacggaatggggaatttatacagtgtctcaaaggcgcttgaacgtgtcggcgtgccgtattttgtttctgaaaagccggaggagctgaaagaagctgatgccttcattttgccgggagtcggttcatttggagacgcgatggacaatttgcgctacacgaagcttgatcaattgatttacgatatggtctcagagggaaggctgcttctcgggatctgcctcggcatgcagcttttatttgaagaaagcgaagaaaacggcaccgcttcaggactcgggctgttaaaaggaaaagcagtcaggctgaaagcagaagatgaaaaaggaaacaagctgaaggttccgcatatgggctggaatcgtctttcctttcataatgaatctccgctgctgactaaaacagaacagggctacgcttatttcgttcattcctattacattgacgggatggaggagaacgcgcttctggcaagcgccgattatggtgtacgagtgcctgctgtagtcggaaaaagaaacgtcttcggcgcccaatttcatccggaaaaaagcagcacggtcggaatgtctattttaactcaatttacgaaaatggcagcagaacagaaggtgaaaaaatgagtgcttttacattatatccggcaattgatatgagaaacggcaaatgtgtccgccttgttcaaggggattacaataaggaaacgatatatggcgattcaccgtacgacatggctgagttatttgcgaaagagggtgccgaatggatccatctcgttgatctcgacggggccaaagaagggaaaagagtgaatgaccgccatgtgattgagattacgcaaaagctgaacctgaaagtcgaaatcggtggcgggatccgttccgaaaatgatgtctatgaatatttatcagcaggagtcgatcgggtgatcctgggaagctcagcagtttctaaccctccgtttgtcaaaaaaatgctgaaacaatatggcgagaaaattgcaatcggactggatgcgagaaacggttttgtttcaacagagggatggctggaaacatcaacccttaaggcaactgaactgggcaaagagctagccaatgaaggtgcggaagtctttatttttactgacatcgcgacagacggaatgctgtcaggccccaatgttaaaagcacggtcgagcttgctaaggaaacggggaaatcggtgatcgcttccggcggagtcagctccgtcgcggatctcgaagctctcgcccgctatgaggcggacggcgtctctggagcgatcatcggaaaagcgctgtataccaatcagtttacgctgtgtgaggcgcttgaaagggtgaagcgcaaatgatcacaaaacggattattccatgccttgatgtcaaagaaggacgcgttgtcaaaggaattcaatttctcgaattgaaggatgccggtgacccagttgaactggcggaagtgtacgaccgggaaggcgcggatgaactcgtttttcttgatatttctgcctcgcatgaaggacgcaaaacgatggttgacgttgtggagcaggttgccgcgaagcttgccattccgtttacagtcggcggcggcatcaatcagctcagtgatatgaaaacgatactgcgtgccggagcggacaaagtgtcggtgaacacggcagctgttctccgccctgagctgattgcagaaggagccgagtttttcggttcgcaatgcatcgttcttgccattgatgccaagtatgacaaagaatctgacacatataaggtctatacgcacggcggcagaaagaaaacagattgggaggtcaccgcgtgggcaaaagaaggcgtcaaacgcggggcaggagaaatattgctgacaagcatggactctgacggtgagaaaaaaggcttcgaccacacgctgacaaagcttgtttccgaagctgtccccgtccctgttatcgcctcgggaggcgcgggaaacgcacagcatatgcttgaggcttttacaaaaggagaagccgatgccgcgctggccgcctcaatttttcattataaagaaacatcgattaaagaagtgaaatcatacttgaaagagtacggggtgaatgtgagatgaaacaggcagatgaactgcgttttaacgaggacggattaattcctgctatcgtgcaggatgcggcaagcaaagaagtgctgacacttgcgtatatgaacaaggaatcgtacgaaaaaacgctggaaacgaaggaaacatggttttacagccgctcacgccaagcgctatggcataaaggagaaacctcagggaacacgcaagccgtcaaaggtatccggtatgactgcgatcaagacgcgctgctcgtactcgtagaaccgtcaggcccggcatgccacactggcagctactgctgttttacaaaggaacaaacagaagaacaggccgcggaccgattcggcatcatgaacgaactggagcgggtgatcgcggaacgccaagcggaaatgcctgaaggagcttacaccacgtacctcttccgtgaaggcgtcgataagattttgaaaaaagtaggagaagaagcatccgaagtcatcatcgccgcgaaaaaccgggatcatgaggaactcaaatgggaagcggcagacctgctgtatcacctgcttgtcctgctcagagaacaatccctgccgctggatgatgtgcttgacgtattgaaaaaacgccattctgagattgaagagtaaagagccgtatgatacggctctttttgttttgtgaaaaaggtaataggtatttagatttatatgaggtgttatatatgattagttaataaaaggagatcaaaaccgagtccgatttcctatttatccaaattcagccatgatgtaacatgaaaaaggataaaataatcatttcttaagcaggtcaatagaattattttagtatgaaaatagaattctattctcacaaaaaccgtggaggttcgtaatgaaaaagatcatctttatttgcttcagcttattacttgccctgacaggaggatgcagtatgaatgacaatgataaaaacagcacaaatgacaataaaacagaagcggtaaagccaaaagacatggatcccaaagacctgcctcaagtacctgcgtttcaggacgagaaaacgagagagtacatggtgtcaacaaaagaagaggaaccaggatattatttgctggaatctaagctgaaagggtttaggatgttgtttccggaggatggggagtatgtacctgatctttcaagtaaaggtgaaaatgaggaaacaatagtatttgatagtttcaataaaaaaactaacattcaatatgacgggcaattagattatcatcaagaaaaaagttttgcgaatgacaaggatacaatgcttgacattgtaagtggcagaaatagctataaaggaaaatacgaagaaagagagctatctgataaaattgtatattctgctcaaaagaaaagcagttttgatgatgtggatgaaaagaataatttttcttatagattttttggttatgttaaatctaaaaaagaggaatatttaggaatagagtattcttttcgtttttcttgctataagggtaaagaggtttgttcattaaagaaagaagaagcagaaaaaaaagttcgaaaaataattgattctattacctttttaaaagttaaaaaggagaaatagagaaaatggaaaataagaatatatttgaaaatgaaaatgtaaagctgcgtttaattgatttggagtacgattataaagaaaaattcgcttctaatattgaaagtgaaataaagagagctaaaacagattttgaagtcgaggtgcgtcgaatatacaaagaagaaacacatcgagatcttccaaaaaatctggaaatatacacatctaatgaacttattaaaaaaaattcgaaaatagatacatcaataagagagtccggatatgatggtacagctatttatattaaggatgataaacaacacgttaatcaacttcatattatttcagaggggagtgctgataacgaagactggtcatacaatttctttggtctctttttagggatagatgacagccagtaccaagcgacaaaagagtttgtaagaaatgccaaaagagaaacagagaattctaatgatttaaagacctttgctatggggcactcactggcaaataataatcaggtgatggttcaattaattgacggagaatttgatgaagtttatggggttaacggagctcaaataagcgttgaccacctactagcaactgatttgaatttgagagataggttaatgcataaatttcatattagacgcttaaaagatattaatgatatcccgccagaaaagttaaaaaaagaaatccaaaaatattatgaagacaaaggcgtgacagcaaacatcacccaacgcatctcaaaagatgacccgctgtatggagtcagcggcaaggccgatttcattacattcggtgatgtgaagatggcagatacaaatacaagtgtaaaaggcatccgaaatattatggatggggttcctgacgaagatgtgaggtcaattcaaaaattccttcaaaaatataaggatgactatgaaaaagacggcttgaacggttttataaaggcagccagcgggatagacatagacctgattgaaaaagtgaaaaacacagacggcgctttaaagaaagtaagtgtcctatatgagcattttgatgatgttaagcaaatgtatggccgaataaaagaagaactgccttcatttttaggttttcttcataccttgttgagaaacagcggaccggtcgtagatcagttagctgaaaatggttatattgatgaaacgcaaaagaaagtcatcaaaaaagaattaacgaatattaatgcgagtatgcgaggcatagaatcacggtacgaacatttcattgaccatctaaagcatggccaatttatgcaagctttaaaagacgttggtgaaatagtggactacgtaaaatcaattctgtcctcattgaaaacactcgacacagaaacaaaagacgcactaaaacttatcgtcgacggccacagtatcgttcaaatgctcaacgccttgtcaaaggaaaaaggcttcagctataaaggctccgatatttattttacagggaagagcggctcgggagaaacgattcaagtcaatctctcatccgctgtcagaatctatcaaaacggtatgaaaatcgttgaagatatggaagatgcgatttctaagtaccagaaggtttacagtcaggaaatcgatgaagacttcatagataaaaaacaggcgatcaccacggcgattcatcatatggaagaaaacccttcgcattatgccttcgatcttcaattccggcttgcagctggtttcagccacacattcgataaattggagaaaatctctgttcatgaatcattccacacaggtgcgcttcctgctaatgatggaattgttgctgaattaaaaaaacagacaacagaaaaaagagattttatcaaaaatatccgtgagagtattgaaaagctgtttgaaaaagaagaaatgatttctcagttatttgattttcagccttaggaggaatatgaagagtgacttccttattttcagaaagtgaaacagaaattgtatcaacgacctatatgtttcttactcaagatgaaatgaaggggaaagcgggcaccctcaatcaaccgatcaacgactttctcagcctgacaaagaaatttgagtcttcattaaaagaggaaatcaaaggacaaaaaggattgattgtaaaaaaaataaaagaagaacttgagtcgaaaagcgaaaaacgaaaagctgcccttgagatgataaaagaggaacataccgcaaaagttgatcggtacaaaatgataattgaagacctgcgacagcaggatgtaacattgacttatagaaaaaagaagcctgtgaaagatgtctaacataaaaaatctcctattcaaacaatgagtgggagatcttttattttcatcacggcaaaaatatactgaaaaagtctctcgccattgatatgattgagaaagagtaaaaatcatccttttgctatgacttttcacctttctgaacgctgaaacaggaggaaaatatatgccaaccaagaaacaaaaatctaaaagtaaattgaaacccttttttgccttagtaagacggaccaatccttcttatggaaagctcgcctttgcgcttgccctcagtgttgtaaccacactggtcagcctgctcattccattattaacgaagcagcttgtcgatggtttttctatgtcaaatctgtcaggcacgcaaatcgggttgatcgcgctggtgtttttcgttcaggcgggtttaagcgcttatgccacctatgcccttaactataatggacaaaaaatcatctctgggctgcgggatttattatggaagaaattaattaagcttcctgtctcttattttgatacaaatgcttccggagaaacagtcagccgtgtaacgaacgatacgatggtggtcaaagaattgattacaacccatatcagcggatttattacaggcatcatttctgtcattggatcattgacaatcttgtttattatgaactggaagttgacactgcttgtgttagtggttgttccgctggccgctcttattttggtgccgattggacggaaaatgttctccatttcacgggaaacacaagatgaaacggctcgttttacaggcctgctgaatcaaattctctcggaaatcagacttgtcaaagcttcaaatgcggaggatgtcgaatatgggcgcgggaaggtggggatttcctcattatttaagcttggcgttcgtgaagccaaggttcaatcgcttgtcggcccgcttatttcactcgtgttaatggcagcgcttgtcgcagtgatcggatatggcggcatgcaggtctcatcaggcgagctcacagccggagcgctcgtggcttttattttatatttatttcaaattattatgccgatgggccagattacaacgtttttcacacagctgcaaaaatcaatcggtgcaacagaacgaatgattgagattttggcagaggaagaggaagatacagtgacaggaaaacaaattgaaaatgcacatctgcctatccagcttgattgcgtgtcttttggatataagcctgatcagctgatcttaaaagaggtcagcgccgtcattgaagcaggtaaagtcacagcgattgtcggtccgagcggcggggggaaaacgacgctgtttaagctgcttgaacgtttttatactccgactgcagggaccattcggctgggggacgagccggtcgatacttactcgcttgaatcgtggagggagcatattgggtatgtatcacaggaaagcccgttaatgtccgggacaatcagagaaaatatttgctacgggttagaacgagatgtgacggatgctgagatcgaaaaagccgcggagatggcatatgcgctcaattttataaaggagctgccgaatcagtttgatacagaagtaggcgaacgcggcattatgctgtcaggcggacaaaggcaaagaatcgcgattgcgagagcacttctccgtaacccaagcattcttatgctcgatgaagctacctcaagtctcgacagccaatctgaaaaatcagttcagcaggcgctggaggtgctgatggaaggccgcacaacgattgttatcgctcaccgcctatctaccgttgtagatgcggaccagcttttgtttgttgaaaaaggggaaattaccggtcgtggaacacaccatgagttaatggcttcccatggcctttatcgggattttgctgaacagcagctgaaaatgaatgcagacttagaaaacaaagccgggtaaattttggtcgaatcatccaataaaaaagaggagggattttcccaatccttccttttgaactattgaggggcttacgatttatggtatactactgacggtaatattgtataaaacggagggtagttgtgggaaaacacacttctgaacataaaaatcacgcacaaattgtccagctgcttcaagatggacaatatttttttcataaaggcttgaaagcgtataaagagcgcaatctaaaacgggcaagcaaactgattcagcgcgcggttcatttggagccggaggattcagagatgctttcacagcttgcggtcatttattcggaaatgggccagtatcaagagtcgaacgatcttcttgactatatcatggcaaatctggaggccgaaatgccggagtgccattactttaaagcgaataactttgcccatctggggctcttccaggaagcttataaagaagcggccgcttattctgatgcggacccggatggtgaattcgccgaagaaaacgatagtctgcttgatttgctcgatttaggagacgacggcattgaggattcgttgtatgatcaggatgaactgctggtgaaacaggatcgggcaaagtcattgctggaaagcggccagcttgctgaagcggttgcggcgcttgaggaaatcacagctgaatatccggagctttggtcagcatacaacaatctcgcgcttgcctatttctattcaggaaacgttgtaaaagcgaagcaaaccgcttatgaagtgctttctcataatgaaggaaatcttcacgccttatgcaatcttctcgttttctactattatgaaagagaagacgaaaaagtggcggaattgagtgatcagctctccaatgtctatccgatgctattggagcagcgttataaattgggtgctaccttggcacttgtcggccgctacgagatcggatataaatggctcaaatcattatataaaatcggctttgaaggtgacgacaccttcttttactggctttcatgctctgcttattttacgggacataccgactttgccgagacgatctggagaaaagtcgagtcgcaatatcccggcgaagaccgcccggcgccttggattgagcggagggaagctcttccttcatctgtggaacagcgtctcgcagcctattatatcagcagcacaaagggagaaacagagcatcttgaagcggtgatacgctcaaagagaataaccgctccttttgaaaatcattttgtaaagctgcttctaaatggagattctggggctgctgacgtttcagaggatgcacttttcgcctatcaaacggtcaaactattagagcaagctgaaaaagaagagatgaaaacagaagtcatgagctgctgggttttccatgtcatccagcaaattcgtgcagttgctccgttgaaaaatgagaaaggctgggcagcagccatctgttatatttggaaagaagcccatggcaagcaagacacgaaaaaagacacagcggcccgattcggcatctctccggcaactttgacgaaatatatgaaatatattgatgatattctagaatagtaaattttaaagagtcgatttatttaatcgactctttttttgtttgatagattatattaagaaaataatatcgacagtttttttacacgcttaagaaaaatgacaaatgatgtgtgacttgacatctgtttgaaacataaatgtaataaaatttatcgctaatttgtcgaaacttgatggtataatgattctcgtacataaggaattagtgttttttacatatgatgtgaaataaacgctatacaaccagaataagagatgcacagaataattaaccataaacaaccatcattcctcgtagagtatgaggaacgaaacttgatgttcaaaatacgattccaaatgaggacaggttcacagtaaaagggaggatataaaaagtgagaaagagtttaattacacttggtttggcttccgtcatcgggacaagcagttttttgatcccatttacaagtaaaactgcatcggcggaaacattagatgaaaagaaacaaaaaatcgaaagcaagcaatctgaggttgcttccagcattgaagcgaaggaaaaagaattaactgagcttcaggaaaatcaatcaaagattgaaaaagaactgaaagacattaacgctaaggcgcttgatacaagcaacaagatcgaagataaaaaagaagaaaatgataaaacaaaagaagaaatcaaaaaactaaaaaaagagattaaagaaacagaagcacgcatcgaaaaacgcaatgaaatcctgaaaaaacgcgttcgttctttacaggaaagcggcggatctcaaggatacatagatgttcttctaggatcaacaagctttggtgactttatctctcgtgcgactgcggtttcatctattgtggatgcagacaaagatttaatcaaacagcaagagcaggataaagcgaagctcgaagattctgaagcggatttgaatgataagctgaaagaagttcaagctgcattggctaaattagaaacaatgcaaaaagaccttgataaacagcttaatgaaaaagacaagcttttcgacgaagcaaaagcaagccaaaagaaaacggctaaagcgatttctgaattaaaatcagaggcgtctgaacttgcaaatcaaaaagcaaatactgaagctgaacaagcacgcatcaaaaaagaacaagaagcagcggctgctttgatcaaaaagcaggaagaagcacaaaaagcatctgatgaaacacaaacagatgacagccaaacggctacaactgaatcagcaaaagcaagctcatctgatgattcttcagacaattcttctaacggttcatcaaacagctcgtctaacggctcatcttctaagaagagcagcggctcaaacagcaattcaggcggcactgttatcagtaactctggcggaattgaaggcgcgatcagcgttggttcaagcattgtaggacaatctccgtacaagtttggcggcggacgcagtcagtctgatatcaacaaccgtatttttgactgctcatctttcgtacgctgggcatacgcttctgcaggtgttaaccttggacctgtaggcggaacaacaactgatacgttagttggcagaggacaagctgtcagcgcgtctgaaatgaaacgcggagaccttgtgttctttgacacttacaaaacaaatggacacgtaggaatctacttaggaaacggtactttcctaaacgacaatacatctcatggcgtatctgttgactctatgagcaatccttactggaaagcagcatttaaaggcgttgtaagacgtgttgttcaataataaatatgacaagggccttctataaacagaaggctctttctttattagcatatacccttttcgaatacatttaatcgtgttgagcaaaaaaatagcgtatcaccatgagattttataggatatgggtaaggaatacgtttgatggggattcttatcttataagaaagagcccaaacttgaaaagatggtttaaggagtgaatagtgtgtcagaagaaaaaatttatgacgtgattataatcggcgcaggccctgctgggatgacggccgctgtatacacatcaagagcgaatttatcgacattaatgattgaaagaggaattcctggcggacaaatggccaatacggaagatgtagaaaactatcctggattcgaaagtatccttgggcctgagctttctaacaaaatgtttgaacacgcgaaaaaattcggcgctgaatacgcttatggcgatattaaagaggtcgttgacggcaaagagtacaaagtagtcaaagctggttcaaaagaatataaagcccgtgctgtcatcattgctgctggtgcggaatataaaaaaatcggtgtgcctggcgaaaaagaattgggcggccgcggtgtatcttattgtgcagtatgtgacggggctttctttaaaggcaaagagcttgttgttgttggcggcggagattccgcggttgaagaaggcgtgtatctgactcgtttcgcttcaaaagtaacgattgttcacagacgagataaactccgtgctcaaagtattcttcaagcgagagcatttgataatgaaaaagttgacttcctgtggaacaaaaccgtgaaggaaattcatgaggaaaacggcaaagtcggtaacgtaacgcttgtcgatacggtaaccggtgaagaaagtgaattcaaaacagacggcgtattcatttacatcggcatgcttcctctgtctaaaccgtttgaaaacctgggcattacgaatgaagaaggctatatcgaaacaaacgaccgcatggaaactaaggttgaagggattttcgctgccggagacatccgcgaaaaatcactgcgccaaatcgtaacggctacaggagacggaagtattgcggcacaaagcgtacagcattatgtcgaagagctccaagaaacgctgaaaaccttaaaataaaaagggctgtcatacgagtttcacattacgttactgggttttaattccgttgtaacacatgtgtaatgcttttcggttatgattaataaagtaattgaccccctttttataatgaatacacttttttggcacggattctccagttatccgtgtcctttttttgtccataaataaaagatgaatgccagttacagcaaaatcatctgaattaaggaatgaatatgctgtaaaatagaagaaaagattgtcaatgtctcttcattgtgggaggcatcttgaagcggtataataaagagacgatgacaggacgaaggttaggtgacgtacttgcaaagagtgacaaattgtgtgcttcagacggatgacaaagttcttctgcttcaaaagccgagacgcggctggtgggtcgcgccgggcggcaagatggagagcggagaatcagtcagagactccgtcatcagagagtacagagaagagactggtatctatatcataaatcctcaattaaaaggcgtttttacctttattattaaagacggtgaccacattgtctccgagtggatgatgtttacgtttgtcgctgattcatatacaggacaaaatgtatcagaatcagaggaaggcaaactgcagtggcacgatgtcaatgacattcagaacctgcctatggcccctggagacggccatatccttgattttatgatgaagggacaagggctgctgcacggcacatttacgtatacaccggaatttgatctgctcagttatcgtttagacccgcagcacatcaaatagaaagacaagtcaggggggagaaagatgagtgttagtgaatcacatgatattcagcttgtcattataactggaatgtcgggagcggggaaaactgtcgcgatccaaagctttgaagatctcggctatttctgcgtcgataatcttccgccttcattgcttccgaagtttttagagctgatgaaggaatcaaattcgaaaatgagcaaagttgcgctcgtgatggatttgcgcggccgcgaattttttgaccggctgattgaagcgctggatgaaatggccgaaaatccgtggatcacaccgcgaattttattcctggacgcgaaggattccattcttgtcacaagatataaagaaacgagacgctcgcatccgctggcagcgactggcctgccgcttgaaggcatcgcgctggaacgagagctgcttgaggaattaaaaggccgctctcaaatcatttacgatacgtctgacatgaagccgcgtgatttgcgtgaaaaaatcgtgaagcactttgcgacaaaccaaggagagacatttaccgtgaatgtcatgtcatttggttttaaatacggtattccaattgatgcagatctcgtctttgatgtcagatttttgccgaatccgtactatatcgaaagcatgcggccgctgactggcaaggataaagaggtttcctcttacgtcatgaagtggaatgaaacgcaaaagttcaatgagaaattaattgatctgctgagctttatgcttccatcttataaaagagaaggaaaaagccaggttgtcattgcgatcggctgcacagggggccagcaccgctctgtgacattagccgagaatttagctgattatttcaaaaaggattactatactcatgttactcaccgggacattgaaaagagaagccggaaataagatgggacaaaagccgaaaatcgcaatctttggcggcggtactggtctttctgtattgcttcggggcctaaagcataaacccgttgacatcacagccattgtaacagttgccgatgatgggggaagctctggccgtctgcggaatgaactgaaaattccgcctcccggagacatcagaaatgtgcttgctgctttatccgatgtggagccgcttgttgaagatctttttcagcaccgcttcaataaagggaatgacttaacaggccattctctcgggaatttgattttggcagcgatgacaaatataaccggtgatttttttcacgctgtcactgaaatgagcaaggtgctgaatgtaagaggaaaggttttgccggctgcaaataccagtgtcgttttgcatgctgagatggaagacggccgcgtggtatcaggtgagtcaacgatcccagaatacggacagcgcattaagcgtgtttttctcacgcctgaacagattgatccgctgccggaaacaatagacgtgatcagggaagcggatttgattattatcggcccgggaagcctctatacaagcattcttcccaatttgctcgtcccaaaaatcggggaagaagtgataaaggcgccggcgaaaaaagtatacatttgcaacgtgatgactcagcccggcgaaacgctccattacaccgctgctgatcatgtgaaagcgctcaatcagcatatgggctgtggttttattgatacgatattagtgaacagtgaagacattcccgacgaaataaaacgtaagtacgaaatggaatcggcgcgtcctgttgattttgatatcgaagagctgaaagcgatggggcttgaagtcatcagagatcaaattgtaacgtataaaaatgacgtaatacgtcacgatacacataaagtggcctctcttcttgttgatttactgaaagaatgaagccttgaaatgaggtggctatatgtcatttgcatcagaaacaaaaaaagaattaacgaatctggaagtgaaggactgctgcattaatgccgagctgtctgcactcattcggatgaatggagctttatcatttacaaaccgccatctcgtactcgatgttcaaactgaaaacgcggcgattgcccgccgcatctatacattgctgaaaaaacaatatgatgtgtcggtcgagctgctggtcagaaagaaaatgcggctgaaaaagaataacgtctatattgtgcgtttttcagaaaatgcaaaagcgatcttagaggatttaaaaatactcggggagaattttgtgtttgaacgaagtatttcgaaagagctggtcaaaaagagatgctgcaagcgttcttatatgagaggagcatttttggcaggaggttcggtcaataacccggaaacctcctcgtatcatttagaaatcttctctctttataaggagcataacgattcattatgtgacctgttaaatgagtttcagttaaacagcaaaacgctcgaacggaaaaaaggctatattacctatttaaaagaggctgaaaagattacagagtttcttaacgtaattggcgctcacaattcgcttctgcgatttgaggatgtcagaatcgtccgggacatgagaaattcggtcaaccgcctcgtcaattgtgaaacagccaacttaaacaaaacgatcggcgcatcgctgagacaggtggaaaatattaaatacatcgatgaaagaatcggcctggaggcgctgcctgaaaaacttcgggaaattgcgcagcttcggattgattatcaggaagtgacgctgaaagagctgggggaaatggtagcaagcgggaaaatcagcaaatcagggatcaatcacaggctgagaaaacttgacgaaatcgcagaacagctgcggacagggcaaaccgtcactttaaaataaccgtaaagaaaaggggagatcttatggttcaacagaaagtggaagttcgattaaagacaggactgcaagcacgtcctgctgctttgtttgtacaagaagcaaaccggtttacgtcagatgtgtttcttgagaaggatgggaaaaaagtaaacgccaaaagcatcatggggctgatgagccttgcggtaagcacaggcactgaggttaccttgattgcccagggagaagatgaacaagaggcgctggagaagctggctgcttacgttcaagaagaagtttaggtgataaaaatgagtgactttctaaaagactgctttcagaaaatcggctgggagaaagaccatgtcagcttcggcgatcttcccctttttcttaaagcaatggcataccgttttccattcgaaaaccgtgccgtacttgcaaaagagaattataagatcacaaaagaagagctatggcgacgtctgctcaaagatcagcacggcggcctatgctacgatttaaatggttttctttattttgtcttgcgtgaggctgggtttcatgtgaagctcattcgaggaacggtttatgcaggcgatcaagagggatgggcactagaagggacgcatgctgctgtatggctgtctgcggaaaacggcgattacctcgttgatatcggcttcggcatcaacctggcgctccagccgataccgctttccggagaaacggtacagtcaccagtcgggtcattccgaatcaaaagagaagagacagaaaagggcagccatgttctgctgatggacaagggagaaggctggcaaatcgggtacgcctttactcttgaagagagtgatctcggtgatttagataacatgaaggacatcattcactctcatgaaaaatctccttttaacaaatccccgcttgcctcaaagctgacgccgagcggaaggatggtcatgtcagagcgccattttacgattcatgaaaacggcagtgacattcaaaaaagcgacattggcccttcagaatttgaagagaaattaaatactcattttttgtaacgtgaaaagcttgcaggttatctgcaagctttttcttatgaacaagtgtagattgctgtatcaaatgcatcttctgggatatacagttttcccttttcgtatttataaggaatttcattctctataaaacactctttggtatagtcagttagtgtatccccaatttctatgtatttcccggtatagttgggctgacatgctgaaagaattgacgtcattgccagaaacagcatgattttcttcatcacgacacctgcctattatgaaaattttacctttatcattctattataacaaaaagaaaaagtccgatttgcttttccgcacatgctataataattttggaatcttctagaaaaaccatcgtgatgtacatataagggggatcaacgtgtatcggattttgcttgtggaagatgatgagcggattgcttctttgctgggcggtcatcttcaaaaatacggatatgaagtgaaaattgctgaacagctgaatgatataaaattggaatttgcagaaatgaagcctgatcttgtgctgcttgatatcaacctgcctttttttgacggattttattggtgcaggcaaatccgtaccatttccaatgcgccgattatctttatatcggcacggaccgatgagctgaatcaggtaatggcgattgaaaatggcggcgatgattatatcacaaagccgttccatctagaggtagtgatggccaaaatcaaaagcgtcctgcgccgcacatatggtgaatattcgccctctttgccgcaggaatctagaatagtggagcttggtgggctgacgatttatcctgatcaaaatgaggccgaatggaacagctcccgtattctgttttcccaaaaagaatttcagcttctctctatttttgtgagggagcataaaaaaattgtttctcgtgatgaactattggaggcgttatgggatgacgttgattttgtcgatgacaatacgttaacggtcaatgtcaaccggctgcggagaaaactggagaatgccggactgaaagattgcatttccacaatcagaggacaaggctatcaatttcaagtcaatcggaaggatgaagcggagtgttaaagacttatctcatcgaccgcttagccattattctattttcattattagggataggatccgccatgctgattgcgtatttaagcattgtagagagcggcgcagaaccttccaaagaaaatatgatgtacatatggattttgcccggtactcttttagccgcaggttttgctgctgattatgttcggcaattttcctttctcacatatgttaaaaagcttgcagaacaagcctcttcttcgaatgacatcggacagtctttgaaagccagaaagccaagaacaggagagcaagcgctttggacgaagatgatcaacgcactcgggcagcaatacgaaagcaggctctcacaatatatcaatcagcaaaaacagcattataccttcaccaaccaatgggtccaccatatgaaaacaccggtatccgtcatatccttaatgattcaggaaggaaaaaacggaacctcatcctcttttccgacgtttttagaggagctggaggatgagaatgagagatttcgccacggtcttgatatgatgctgcaaacggctcggctggaggaatttgcatttgatgtaaaaccgcaaacctttgatttgacagaaatggttcgttcactgatcaatcaggaaaaacgtcagtttattaaacggcgcctttttccaacattacatgtgccgccaaatgccattcagatttccagtgatcaaaagtggctttcctttgttgttgagcaaatccttttcaacgccttaaaatattcaaagcaaggtgtgggagaccctattacaatccggattgaaacgcagggacatgagacgcgattgtcggttgccgacgaaggaatcggcataccgccgcaggatctgccgcggatttttgacgcgttttttaccggagaaaacggacgaaccatgaaagaggcaactggaatgggcctttatttagcaaaacaggtgtgcagccgtctcggccataagctgtatgcggaatcaagagaaggggctggcactgtgatgaccatcgtgttttcaagtgacaccctcgtgaatgtgacagcattgtaaggttggggagcggaattgcaagaaagttcgatgggaggatgctgacttcctttttataataaagaaaaaggaggagcagaacatgaatgtgttgcaaacaacgaacctatcgaaaacgtactattcaaataaaggaacaatatcataccaagcgctcagcgcctttgatctcagtgtgtcaaaaggagaatttgtcgggattatggggccgtcgggaagcggaaaaaccacgcttttgaatttgctggctaccattgataagccgacccagggcgagatgatgatcaacggcattcagccgaaaacgttaaaggaccaagagctggctttgtttcgcagaagagaactcggcttcgtctttcaggattttaatctgcttgatacgctgacgattcgtgaaaatattctcttgccgctcgcattggataaggtaaagctgagagaaatggaagcccgattggatgaactggcggatacgctgcaaatcaagcacattctcgatcatcgcacatatgaggtgtcgggcggacagcagcagcgggcagcctgtgccagagcgattatccacaatccggcgctcattcttgccgatgaaccgacaggaaacctcgactcaaaatcggcaaagcaagtgatgaacacactggctcagctgaatgaggaaaaggaagcgacgattttgttggttacgcatgatgccacagcggcaagtttctgtaaacggattgtttttattaaagacggacgtttcttttcagagattcacagaggaacaaacaggcaggtgttttatcaaagtatattggataccttgagtgtgttgggaggcgattttcatgaatttgagaactatcgcccgtaaaaacattcttgggaatctgcaacggtatgtggcctactttttaagctgtgtgtttgccgtttcggtgttttttgtcttcacatcatttatttttcatcctgatgtcaatgaagacaatatatatggcggaagccttgtcaaaacatgcttgagcgcagctcttgtcgtcatcattgtgttttgtatatttttcatcacatattccaattcagcgtttttgcaggcaagaaagaaagagtttgggctgctgacactgtttggcacatcaaagcagcagcttcgcaagatgatttattatgagcagtcacttatttctcttgcggcgattgcggccggcattggagcaggcctgttattttcaaaactgttttttatgatcatgacatggatgctcagcgtgaaggtgccgatttcgtttgccattgtgccgaaagcgtttgtgatgacaattgccggctttctcatcctgtttcagacgctgctcattttatcactgggacggattcggaaactggaaatcattgaactgattaaatcggccaaaaagccgaaaagcttgccggtttattcgaaatggctcactgtattgtctttgctatgtcttggcagcggttattatctatctgcaacagccaatgcaattgacatgatgtttcgggtatttccaattttgattttagtgttaattggcacgtatttcttttttacacaaagcagtgtggcgtttttccgcatgctgtaccgaaagaaacacagcttctacaaaggcacaaatatcattgtgcgttccaacatgatattcaggctgaaggatcatgcacgcatgctgtttttaacctctgtcattacagcggtcatattaacagctacaggtgtcatctatatgttttattccgatttacaaaggcaggaggagcaaagcattcctcagtctgtttcctgggtggaaaaggatgcttcccgctttcaggtcatgaagcctgagacggctgagaatacattgaaaaaagctcatgctgttatcaagtataaggtggatgccactgggattcctgtcacttttcagtcagacttgccgtatggaaataagaagatggaagcggaagctttgctgatttcagaaaaggtctataatcaagtggcaaaggaaaaagggttcccagttattcatttacaagaaaatgaagcatttattaatgtttcttttcaaatgatggtgaaagacacatttggagaaggggaaacagcagcatttcatatgaagtcaggaaaaactctttcctacgtcatgaaaaagcagcaaaacaaagggatattgatgtctgtcgatggagtcagccgtttattggttgtcagcgaaaagagctttgacagtctgtcacaggatgtgccgctgaaggaacagatgagaatggtaggttatgagcttgagcattggcaggagacggtggatgtctctgaaaagcttgaaaacatggtgccgaaagaacatacatctgattttcaaacacgtgctcctagttatcaaattgtgaagcagggagttgcattaatgctgtttattggtctgtttgtcagcgtgctgttttttatcgtgcaaggaagcatgctgtatttgcggatgtttacggaaatagaagatacgagagtgcaggtgttagcgttaaaaaggataggggttacggacaaagagattcactcgatccttggaaagcaaataggatttttattcttcatcccatttatcgcaggtacgattcacgccggctttgcgtatgcagcgttaagtaatatgctgaattccaatttatttcttgaggccgtaattgtcatcttcatttattttgtattccaggctgtttattatatcgtcacccgccatatttataagcgtgctgttcttcagcgtatgtaatagaaatccggtctgttatcagaccggatttttgatttattgaaattctcttgtgagatttttcggtgtttgtccttgaatggctgcaatcatattttcggcggcctgtttgcacatgttgaagcgcactttagctgttgctgaaccgatatgaggaagcagcgtgacattatccagctgcagaagcggattatctcgggtgacaggctctttttcgtatacatctaagccggctcccctgatccagccttcctgaagagcgcgaaccagtgctttttcatcgactgtctttccccgggaaatattgacgaaaattgctgaatccttcattaacttaaattcacgttctcctatcatgtgataggtttcatcagtcagcggcgtaatgagaagaataaaatcagattgctccagcaatgtatcaagctctgcatatttaacgccgatgctgtcttctgtttcttgtttgcgatgtcggttatgataaagcacttccatatcaaaaccaaatttggcgcgtctcgctgcttgttctccaattctgcccatgccgataatgcctaacgtttgatgatgaacatcaattccgaaaagcgcttcctcttccacggttccccattttcctgctctgacaaaacggtccagttcggcaacacgtctggcggaagacagaatcagtgaaaaagccagatctgcaactgtgtcatccagtgtataaggtgtatgagtgccgatgactcctctttctttcattgcttctatatcgaagttatcgtagcctactgattggttgctgaccactttgagcttaggcgcgtgttccagcaactcacgattgattgacggcccggaagtccctgacgttaaaagcccttccgcatcttttaatttttcaaatagcacgtcactcggaagcgtatcctcctgccatacttcataacggcaatgttcaccgatgaatgcttcaatctcttcaggaatcggttttgtgataaatacaaatggtttcaacaaggctccccctttatggctgttgtctatttcattatatcggaaataaatagatgttaaaaatatagctgcgttctttttattttctggttcttttgaacttaaaatggagatcgaacagctaaatctgcttaaaaaagttttttaattatcagaattcacccatattttttgtcagacaaatcatcaatatgcgagcagcagccggattataggattcattaaatataaattttattatctttgaaagatataaatgtttatgttttgattctacagtccaattatagtgtctttttttgaaatccttttcttggcttattcctatgctataattccttactgtaagctgggtaagaaggcttgcaaaatcatatggatgggagatgaatcaaatggtttctttaacatcaattttggaacacaatcagcggtttgtcagagagaagaagtatgaaccgtacaaaacgacaaagtttccttcaaaaaagctcgtcattgtcacctgtatggatacaaggcttacagaacttcttccgcaagcaatggggcttagaaacggtgatgctaaaattgtaaaaaacgcgggagccatcgtttctcacccatttggaagcgtgatgcgaagcatactggtcgcgatttatgaattgcaggctgaagaggtatgcattgtcggccatcatgaatgcggaatgtcagggctgaatgcgtcctcgattcttgagaaagcaaaggaacgcggggtggaggatagctgcctgaatttgctgacgagtgccggactcgatttgaaaacgtggctgactggttttcacagcgtggaagaaagcgtttcccacagtgtgaacatgattaagaatcatccgctgctgccgaaaaaggtgccggttcacggacttgtcattcatcctgaaacaggaaaacttgatgtggtcattaacggttatgaaactgagctaataaacaatcactcataagggaggttataacaaaatatgcgattctcagggagattcaagggatacaatttacagaaatttcagaaagacttaattgcaggtatcgtagtaggtgtcgtggcaattcctttaggaatggcgtttgccattgcctcgggagtcgagcccgaatacgggctgtacactgttgttatagcggggatttgtatctctttgttcggaggatctaaatatcaaattggcggtccgacaggcgcctttgtcccgatactgttcggcattatcatgcagtacggattagagaatctgctgattgcggggtttatggcaggggtaatgctggtgctgtttgggctgtttaagctcggaaaaataatgaaatttgtgcctaaacccgttatcgtcggttttacagcaggaattgccgtgttaatctttacggaacaaatcgctaattttctcggattgagaaatgttgaaaaacatgagaactttcaccacaacatgtttgaaattgtgcagcagctcggcacctttaacgtgtatgccattttgacagctgtgatcgggctcgtcattttgcttgtatccgccaaggtgatgcctaaagtgccgggcgctttgttggcgcttcttatttccacagtggtcgcggttgtctttttccctgaccgcatggcaacgatcgggtcaacttatggagaaatcccccgccatttgcctgaatttcagtttcctgagcttactttggataaaatggttatgctgtttccggctgcgcttgtcatcgcgcttcttggaggacttgagtcgattttgtccgcaatggtcgccgataacatgaagggctcaaagcatgacagcaacaaggagcttgtcggccaggggattgcgaatatggcagcgcccctgtttggcggaatcccggctacaggagcgattgcgagaacggcgaccaatataaaaaacggagcggtttctccagtttccggcgtcgttcacggcgtagtcgttctccttgtcctgcttgtatttgcgccttatgcgtcccatgtgccgctcgccagtatggcaccgattctcatggtggtcgcatggaatatgagtgagcgcaaggaagtcgcaaacatgctgagactgaaaaatgctgattcctttattttggcggcgaccttcgcccttacggttctgtttgacttaatcatcggtgtggcaaccggattgctgcttgcatttgtgttctttatcagaagaatgagcgaagcgacccgcatccacaatcaggaatcgcatcctgttctggcgaagagagaagatccatctgtcagcatgtatgccatagaagggccgctgtttttcggatcaattgattcccttgaatcgtcattgctggagcatgtacagaaaaaaccgaaaaccctcattctgcttatgaataaggtgcactatatggatacgtcagctgaagcggtgcttgggaacattatgaatcgaattaaacgccacaatggaaagctgatgattgtaggattgcaatcgcagccgaaggagctgctgcataaaacaggcctttttcacaaaataggaaagcagcatttctttgatcaccatgatgaaatcacaggttaaaaaaagcggccatcgcggccgcttttttatgcatgctcaaatcgttttgtcagtttttcttggtgggccttcatgacgtcttctaaagagacaccatacatatcagcaagaatggcgatatttccgatgacatctcccatttcttcaatcaattcttgtttttgctcagcgcgtgacgattctttctcatccggccggtctctgccgatttcatacgccctgacagcccgggccagttctccggcttcctccattaaaaagccgacgcgaataaaaggtccgtattctgtccagcctcttttttcgtaaaactctttcatccatttttctgcatcagccagctgcaacctcatcactcctgcattctttatgtatttcatattgatattatcacatgaagatgggacaatatatagtgtgtttttgaatgtttaacacgatatatagatgcggagatgacaagatgaaaaccatttgtgtatttgcgggatcaaaccctgggggaaatgaagcgtataaaagaaaagcggcagagcttggcacgtacatggctgagcagggaatcggccttgtctatgggggctcccgcgtaggcttgatgggcacgattgctgacgcgattatggaaaacggcggaactgcaatcggggtcatgccgagcggtttgttcagcggggaggttgtccatcaaaacctgactgagctgattgaagtaaacgggatgcatgaacgaaaggctaaaatgagcgagctggcggacggctttatctcgatgccgggcggcttcggtacatatgaagaattatttgaagtgctgtgctgggcacagatcggcatccaccaaaagccaatcggactgtacaatgtaaacggatattttgaaccaatgatgaaaatggtgaaatacagcattcaagaagggttttctaacgaatcgcacctaaaactgattcacagctcgtcacggccggatgagttaattgagcaaatgcaaaattattcttatccgattttagaaaaaaagtggacagaaatttaaaaaagagactttctcatggaagcggagagaatgagtctgccacctagcgtatgatccatgaaatatcgagtgtttttaacaaagtgaggtttccttaagggaaatctcttttttatttctcttttgcctgcatcgtatatttaacagtaatagaggactttatcactagtttggataataagcacagataaggaggggatgaaaatggcaacattgtcagatgtggcaaaaaaagcaaatgtttcgaaaatgacggtatcacgagtgatcaatcaccctgagacggtgacagatgaattgaaaaagcttgttcattctgcgatgaaagagctgaattacatccctaattatgcggcgagagcgctcgtgcaaaacagaacacaggttgtgaaactattgatactcgaggaaatggatacgacagaaccatattacatgaacctgctgacaggaatcagcagggagctggatcgcaatcactatgctctccagcttgtaacaagaaattctcttaatattggccaatgtgacggcattattgccaccggcttgagaaagaacgattttgaaggtgtaataaaagcgtttgagaagccgcttgtcgtattcggacaaaatgaaatgggctttgactttatcgatgtgaataacgagaaaggcacttttatggcaacccgccatgttatggggctgggggagcgggaagttgtcttttttggcattgatttagatgagcctttcgaacgtgcaagagaacaggggtacatacgggcgatgaataaaagctttaaaaaatcgaatatgtttcggatcgacaacagttctaagaaaagtgaaggccttgcaagagaactgctgaaatccatggacaatcaggctgcatttgtctgcgcatctgatcgaatcgcgctcggcgtcattcgtgcggcgcaatcccttggaaagcgaattccagaagacgttgcggttaccgggaatgacggtgtgtttcttgaccgcatctcctcgccgcgcttgactacggtcagacagcctgttgttgaaatgggggaagcctgtgcgaaaatgttactgaaaaaaatgaatgaagacggtgctgcacaaggaagcctattttttgaaccagagttaattgttcgagaatcaacgctgtaagcgccttattctgttatcggtaacagggtgaaaagaattgttcccgcaatttcatcatgatactttcaaactatgagccggcttcaataaaacggaaatcaaagggggaaacatgatggaatatgcagcgattcaccaccagccattcagcacagatgcttattcttatgatgggcggactgtgcatatcaagattcggacgaaaaaaggtgatgcagatcacattcgattcatttggggtgatccctatgagtacaacgacggcaaatggtccgcaaacgagcagccgatgagaaaaattgctgcaacagaaatgcatgactattggtttgctgaagtggtgccgccatttagacgtttacaatatgcgtttgttgtaacagacgatcatgaagatatctttttcggaagttcgggtgtatgcccttataacgaaaaaacactggaaacgattcattattactttaaatttccgtttgttcacgaggctgatacatttcaagcgcctgaatgggtcaagtcaacggtttggtatcaaatttttccggagcgttttgcaaatggaagagaagacttgtcaccgaagaatgcattgccgtgggggagcaaggacccgggcgtcaatgatttttttggaggagatttgcaagggattgttgacaagcttgattatttagaggatttaggggtgaacggcatttatctgacgccgatcttttccgcgccttctaatcataaatacgacacgctggattacttttctattgatccgcatttcggggatccagagatttttcgtacatttgtcagccagctgcatcagcgggggatgagaattatgcttgatgcggtttttaaccatataggaagcgcgtctccgcaatggcaggatgtcgtcaaaaacggagatctatcccgctataaggactggttccatattcactcttttcccgtcacagacgacaattatgacagatttgcttttacagctgatatgccgaagctaaacacggctaatcccgaagtgcagaaatatttgcttgatattgctttgtactggattcgcgaatttgacattgacggctggcgtttggatgtcgcaaatgaagtggatcacgtgttttggaagacatttaggcaggctgtatcagcagaaaatcctgatgtttatattttaggtgagatctggcattctgccgaaccctggcttagaggggatgaatttcatgcggcgatgaattacccttttacagagcctatgattgaatattttgctgaccggacgattccagcctcacgtatggctcaccgtgtcaatgcacatttgatgaatggaatgaagcaggccaatgaggtgatgtttaatttactggatagccatgatacaaagcgccttttgaccagatgccgcaatgatgagaagaaagcacgcgcgttgctggcctttatgtttgcccagacaggctcaccatgcatctattacgggacggaaatcgggctggacggcgaaaatgatccattatgccggaaatgtatggtttgggaaaaggagaagcaaaaccaagacatgctgcgatttatgaaacggttaattgctttacgcaagcaggaaaacactttattgactgaaggacatcttgagtggaatctgctggacgacaaaaatgattttattagcttttcgcggactcttgatgaaaaaatactgatttatttctttaatcaagggaatgcggttcaacacgtcagtttacgagagttgaatattgataggaataagaaaatctgtgatgcatggacagagcagccgcttcatcatcacgatgtcattgctgttcagccgggagaatttttgattttgagtgctgccgcccctgtataacattctgttatcggtaacaaatcgaaagttgttgtaaccgctttctataggacaatacaattgttatagtttcgtaaatagaagggggaaaagagatggttcttttaaaaaaggggttcgccatattggcggcatcattcctggcaatcggccttgccgcctgccaaagttcaaaaaatccagcaagcgctgatggcaaaaaggtgctgactgtgtctgtcgaagaaacgtataaagaatacattgaaagcataaaaacaaagttcgaaaaagagaatgatgtcacagtaaaaattgttgaaaagcaaatgttcgaacagttagaagcgcttcctcttgatggcccggcgggtaatgcgcctgatgttatgcttgctgcatatgaccggatcggcggtttgggacagcaaggacatttgcttgacattaagccatctcatacaaaaagctttggtgataaagaaatgcagcaggtgacagttgacggcaaagtgtacggaatgccgctagtcattgagacacttattttgtattacaacaaagatctcttaaagacagcgccaaaaacatttaaagaccttgaaaaattaacagaggatcctcgattcgcgtttgcttcggaaaaaggaaaatcaaccggatttttagcaaaatggactgacttttatatgtcgtacggcttattggctggatacggcggatatgtatttggaaaaaacggcacagattccggggacatcggcctgaacaacaaaggggctgtagaagcggtgaaatatgcggagaaatggtttaaaacatattggccgaaagggatgcaagacaattcaagcgcagacgactttattcagcagatgtttttagaaggcaaagcggctgcgatcattggcggtccttggtcagctgccaactataaagaggctaaattgaactacggagcggctcccattccgacattgccaaatggagaagaatacgctccttttgccggcgggaagggctgggtagcttcaaaatatacaaaagagcccgagctggctgaaaaatggcttgagtatgttgcaaatgatgccaatgcttacgctttttatgaggatacaaacgaagttccagctaacactgctgcaaggaagaaagccgatgagcaaaagaatgaactgacgtcagctgtgattaaacaatatgaaacagcaacgccgactccaaatattccggaaatggctgaagtatggacaggagcggaaagtttaatttttgatgcagcttcaggaaaaaaatcgacaaaaacatcagcgaatgatgctgtaaacgtcataaaggaaaatattaaagaaaagtatgtgaaataaaacggcgggatagcgtccggaagaatagagggcggaaaaaatgaataaacatcacacacttgcaaagcaaaaacgaaaggcagggcttttatcgatcattccaggacttgggcagattgtgaatcagcaattgtcaaaggggctcttatttcttgccatcacaggcttgtttgcttttgaattattcgttttcggtatacaggcgctaaccggattgatgacattgggaagtgttcccggtgaagaccactcgctgtttatgctgattgaaggcacgctgcaattgatcgtgacggtgattttcctcatgttctatatctttaatattcatgattcgcgtaagaccgccgctatgaaagcggcgggtttggaggtcaatacaacagccaaggatatgatctgtcatgcgggcgataaagggtttccatatctatttacactgccggcatatatcatgatggtgtttgtgattatctttccggttttggtgactctgtttgttgcattaacaaactatgatttttatcatattccgcctaatcgtctgattgactgggtcgggtttaaaaatttcttaaatatttttttccttggctcctatcgtgaaacatttgtgaatgtactgggctggacggttatctggacaatctgtgcaacaacgctgcaaatcattttaggtattgtgacggcacttttcgtcaatcaggattttataaaaggcaagcggatatttcgaatgattttcttatttccatgggctgttccggcttttattacaatcatgagtttttccaacatgtttaacgacagcataggagcggtgaatgcacaggtgataccattattcaatcacctgccgtttgtcgagctgcctgcgatcgcgtggaagactgatcctttctggacaaagacagccctcattatgattcagacgtggctcggctttccatatatatatgtcatggtaacgggagtgcttcaggcgattccaagtgaattgtatgaagcggcaaagattgacggggccacttttattcagcgttttcggcatattacattcccgatgattttatttgccacagcacccgtgatgattactcagtatacgtttaatttcaataatttctcgatcatctatttatttaatgagggagggccaggcagtgcgggagccggggccggatcgaccgatatcttaatttcgtggatttataaactgacaacaggcacatcaccccaatattccgttgcggcggctgtgacactgttaatttctttcattgtcattggaatttcactgattgctttcaaaaaatcgaatgcttttggcaatgaggaggttatgtaggtgaacgcgagcactgccagaatgcttaataaaatctgtacgtatttatttttgacgcttttaagtattgtcattatatatccgttgctgattacggcatcatcagccttccgtgtggggaattcggcggcttttcagctcgatttttcgggtccttggacattggatcattttaagcggctatttgacgaaacgctttatctcaattggtacagcaatacacttgtcatcgcgctatcggtcatggttttgcaggttacgattgtgacacttgccgggtactcgtacagccgctatcggtttgcaggcagaaaaaagagcctgatattctttttaatcattcaaatggtgccgacaatggcggcgctgactgctttttatgtcttggcgatgctaataggcgcactcgatcaatactggtttttaacagcgatctatatcggcggcggaattccgatgaacacgtggctgatgaaaggttattttgatactgtgccgagagaaattgatgaagccgcgcgaattgacggagcgggacatctgaggattttcgcttcaattgttctgccgcttgttaagccaatgctcgcggtacaagcgctttgggcgtttatggcaccgtttggcgactatttgctggcgaaatttctgcttcgctcaccggaaaggctgaccatcgctataggattacaatcctttatttctaatccgcagcagcaaaaagtagctctatttgcagccggtgccatactagccgcactgccgatatgcgttctattcttttttctccaaaagaactttgtgtccggtttgacagccggcggaacaaaggggtaatgccaatgaagaatctggagaataaaagctttatcatccgctgcctgaaggcggctgcatccccatcaggtgtttgctgttacgggaataccttcagctggctgcagctctcttttctctttatgtttttaacggcctgcttaatggcgccgttagcggtttcgtttgtgaaaatggatcgcttcagcgttgcatctttcatgccgtcagcgattcaaggggttaatgatcaatttgctgatcaattgcagggttttcaaatcaggaacggaaaactaacaggcgggaagagctctgagaggattgaagatgggcagaatgtgatggcagtcgatatgaagcatgaatatgagacaagcggtgaaaatgggcgattgaaagtaactggatttgaaaacgccgtcatatttcaacctgatcaactgataatcaccgatcaaaacgaaacggggttttctgttggctatgcgaaaatggacgttaagctcgagaaaccaaacgtccatgatgtagaggtcttgatcgatacattgtggttggcacagtataagccgatgatcatgatgctggcatatacggtggtttctatgatccagcttttgttaacgtttgttcttgccggaggtctctggatcacaaaacgatcaaacatggtctctattgcatcattcaaggaagcggcctctatagcgatttgcgcatcagcactgccggcatttgcggcagctgctatcggcatggttcattttgatttgattactgtattgatgatccattcgtgtggcgttactttgatgatctcttttgcatttagatatttgaccaaaacccgccgtgataatggaaacttacattcgggaggaaatgatgataaatcagcggttatttgagattgatgaatggaaaatcaaaacaaatacatttaataaggagcgtacacggctgctggaaagcctgacgtctcttgccaatggctatatgggggtcagagggaattttgaagaaggctattcaggcgacagtcaccaaggcacatatattgcaggcgtgtggttccccgacaaaacgcgagtaggctggtggaaaaacgggtatccggaatatttcggaaaagtgatcaatgcgatgaactttatgggcataggcctatatgttgacggtgaaaaaatcgatctccatcaaaacccaatcgaatcatttgaggtagaactcaatatgaaagaggggattctgcggcgaagcgctgttgtcagcattcaggataaatccgtcagaatcaggtcagagcggtttcttagccttgctgtaaaagaactctgtgcgattcattatgaagcggaatgcctgacgggagatgctgtcattacgcttgttccttacctggatggaaatgtggcaaatgaagattctaactaccaagaacagttttggcaggaggaagcgaaaggtgctgattcttacagcggccatttagcggcaaaaacgatcgaaaatccatttggaacaccgcgcttcacggttttagccgcgatggcaaacgaaacggagggttttgtcaatgaaagctttaaaacgaatgaaatgtatgtcgagaatcgctacagttatcaaacgaaagcatcattgaaaaagtttgtgattgtcacgacttcacgtgattttcgggaggaagagcttttttcgaaagccaaggagcttttggcggatgtggttgagtacggctatgaaaaagcaaaacggaggcacactgatcgatggaaggaaagatgggcaaaagcggacattgagattaaaggagataaggagcttcaacaaggaatacgctacaatatctttcagttattctcgacatattacgggggcgatgcccgtttgaatatcgggccgaaaggatttactggcgagaaatatggaggtgccgcatattgggatactgaggcgtacgccgttccgatgtatttggcgacagccgagccggaggtgacgaaaaacctgcttttgtatcgctttcatcagttggaggctgccaaacgaaacgccgcaaaattggggatgaagggggcactttatccgatggtgacgttcaccggtgatgaatgccacaacgaatgggaaatcacctttgaagaaattcaccgcaatggcgcgatctgttatgcgatctacaattatatcaattatacaggcgaccgagactatatggaagaatacgggatagacgtacttgtggcagtcagcagattttgggccgaccgtgttcacttctcgaaacgaaaaaacaagtatatgctccatggcgtcactgggccgaatgaatacgaaaacaacgttaacaacaattggtatacgaatgtcattgcggcttggacgttggagtatactctacaaagtctcgaaagtatctcagcggagaaacgccgccttctggatgtgcaggaagaagaattgaaagtctggagagaaatcatccagcacatgtactatccgtatagtgaagaactgcaaattttcgttcagcatgacacgttcttggacaaagacctgcaagcagtagatgaattagatccagcggaacggcctctttatcagaattggtcatgggacaagattctccgctccaattttattaagcaggcagatgttctccaaggcatttatctttttaatgaccgttttacaatggaagaaaaacggcgaaattttgaattttatgagccgatgactgtccatgaatcaagcctatcgccctctgtccatgcgattctcgcagccgaactcaagctggaaaagaaagcgctcgaattatataagcgcacagcaaggcttgatcttgataattacaatcatgatacggaagaaggcttgcatattacttcaatgacggggagctggctgacaatcgttcatggctttgcaggcatgcgcaccgcgaatgagacgctgtcatttgctccgtttttgccgaaagaatgggacgaatattcattcaacatcaattatcgaaaccgattaatcaatgtgacggttgacgaaaagcgcgttatttttgagcttgtaaaaggcgagccgctgcacatgaacgtttatgaggaaccggttgtcctacagggacgatgtgaaaggagaacgcctaatgagtgaatggtggaaagaagctgtcgtttatcaaatttacccgcgcagtttttatgatgccaatggagatggattcggggatttgcaaggtgtgattcaaaagctggattacatcaaaaatctcggggcggatgtcatctggctctccccggtatttgattccccgcaggatgacaacggatatgatatcagcgattacaaaaacatgtatgaaaagtttgggacaaatgaagatatgtttcagctgattgataaagtccataaacgcggaatgaaaatcgtcatggatttggtcgtgaaccacacatcagatgagcatgcttggtttgctgaaagccgcaagtcgaaggacaatccttaccgggattattatttttggaaagatcctaaaccggacggctcagagccgaataattggggatcgatcttttcaggctcagcgtggacatacgatgaaggaacagggcagtattatttgcactacttttcgaaaaaacagcctgatttaaattgggaaaacgaagccgttcgccgggaagtttataatgtaatgagattctggatggatagaggcgttgacggctggcggatggatgtgatcggttctatttctaaatacaccgattttccggactacgaaacggatcacagccgcagctatattgtcggccgttatcactctaacggcccccgtcttcatgagtttattcaagagatgaacagggaagtgctttctcattacgactgcatgacagtcggagaggcaaacggctctgacattgaagaggcgaaaaagtacacagatgcaagcaggcaagagctgaatatgatctttacatttgaacatatggatattgatacagaacaaaactcgccaaatgggaaatggcagatcaagccgtttgatttgattgctttaaaaaagacgatgacaaggtggcagaccgggttaatgaatgtcggctggaataccctgtattttgagaaccatgaccagccgagggttatttcccgctggggcaatgacgggaagctccgtaaggaatgtgcgaaggcatttgcaacggttctgcacggcatgaaaggaacgccgttaatttaccagggagaagaaatcggcatggtcaacagcgatatgccgctggagatgtatgatgatcttgaaataaagaatgcatatcgtgaactagtcgtcgaaaacaaaacgatgtcagaaaaagagtttgtcaaagccgtgatgataaaaggaagggatcatgcgagaacaccgatgcagtgggatgccggaaaacatgcgggattcacagccggagacccgtggattccggtaaattcccgctatcaagatatcaatgtgaaagagtctttggaagatcaagattcgattttcttttactatcagaagctcattcaattacgaaagcaatataagattatgatatatggcgattatcagctgttgcaggagaatgatccgcaggtcttttcttaccttcgagaatatcaaggggaaaagcttcttgtcgttgtgaatttatcggaagaaaaggctctgttcgaagcgcctccagaactgattcatgagcgttggaaagtgctgatttcaaactatccgcaggagcgggctgacttaaagagtattagcctcaaaccttatgaagctgtgatgggcattagtatatgaaagcggtcatttttgatttagacggagtgataacagatactgctgaatatcattttctcgcttggaagcacatcgcagaacaaatcaatatcccctttgacagagacatgaatgaaaggctaaaaggaatcagcagagaagagtcacttgaaagcatattgatctctggcggtgcggaaacaaagtatacaaatgcggagaaacaagaacttatgcatcggaaaaatcatgattatcaaacgctgatcagcaaattgacgccggaagatcttttaccggggattggcaggctcctatgtcaattgaaaaacgaaaatataaaaatcgggttagcatcttcaagtcgcaatgctcctaagattttaagacgtttggcaattatcgatgattttgatgccattgttgatccgacgactcttgcgcaggggaaacctgatcctgacatctttttaacagctgcagcgctgctcgatgtttcccctgctgattgcgcggcaatagaagacgcagaagcaggcatttctgcaatcaaatctgcggggatgtttgcggttggtgtaggtcaaggacagccgatgcttggtgctgatctggttgtgaggcagacgaatgatttgacgcttgagctgttacatgaggaatgggagcagtatagaataaaaagtgtttaagggagtcaaatccttgaaatgaaaaaaacctgcaagagacgcagctcttgcaggttgtgttattactttttgtcttctgtgtgagtcaaaattttgtcaatcaggccgtattcaagcgcttcttcagcagacttgaagttatcacggtctgtgtcgcgttcgatcacttcaagcggctggccagtacgttcagcaaggactttgtttagtttgtcgcgaagcaagagaatgcgtttcgcggcaatttcaatttctgtcgcctgaccttgcgcaccgccaagtggctggtgaatcatgacttcactgtttggaagcgcatagcgtttgcctttttcgccggctgcaagcaggaacgcgcccattgacgcagccatgccgatacaaattgtagataccttcggcttaataaactgcatggtatcatagatcgccataccggctgtaatagagccgcccgggctgttgatgtaaagagaaatttctttttcagggtcttctgctgctaagaataaaagctgtgacacgatggagttcgcaacgttgtcatcaatcgcagatccaagcatgatgatacgatcctttaatagacgagaataaatgtcatacgctctttccccgcggttcgtttgttcaatgactgtaggtattaaattcataatgctcctccttcaccttttaggtaagtatgtagttacatgatacatttttggtcaataaaggtcaaacaaaaagctggcctgatatgcaaagtcgtctcttttccccattttccccaaaaatacatgggttcaaaccatcgtatgtcagatttccaattaagatgctgtgtctatttaaaaaacggcctctcgaaatagagggttgttattttaattgaattatcgtataattagttgtgctgacgttctcataacgcagtctatatgcgctcgtagctcagttggatagagcggtggtttccggtaccacgtctgtcgggggttcgaatccctccgagcgcgtccaatagaacaacaggaaagacaatggtttggcaacttgccgctcttgtcttttttgttttgtttcatttcataaatcttttccgctgaaacataaatgttcctccgcttgggcacgttatgaaatgtgcaatattgaatatgggaggaggatgaacatgggtattttaagcggaaatccgcaggatgaaccgatgcattatggtgaggtattcggcttatggagttatgtgatggcgggcaataaaatggtcggcaattaccaaatgctattgaatcatgtcggtgatgacgacctgaagaagctgcttcgtgagtctattgagaaatgccaagatgaaatcaaacaggtcagcacgatcctgaaagaaaacggggtggcgctgccgccggcttctcctgaaccgccgacagcagatcttaacgatattccgcctggcgcacggtttctcgatccggatgtggcggcctccgcggcagcacaaaatgctgcaggtcttgtgacatgcagcaaaatgatggggcaatcgattcgtgaggatattgccatgatgtttgggcaatttcatatgtcgaaagcggcaaccggcgcaaaatacttaaggctgctaaaaaacaaaggctggctcatcccgccgccgcttcatcttcaaaaacatcacgaagcttaatggcaaaggcatatacagctgtatatgccttgattttatgaagatgacgtaagacgcaggccgatgacgccggctaggataaggcaaagtgaaatcacctgtgatagctgaaaccgctccttaaaccaaatgagcccgaccgccgaaacaccaatgcttccaatgccagtccaaacggcatatgcgactccggcaggcaggacgatcatcgcttgggacaggcagtaaaaggataagccgaatccaacagtcatcacaatgatcggccatttttttcttgttccgtctatatatttcatggcaatggcagctataatttcttctatgccggcaatcactaataaaaaccatgccattattgttcacctcccggctgagatttgctttctttcgtaaataatttcattcctaaaatgccagccagcaatatagctaaaaagaacatttgggctgctgagaaggattcgcccagaacaattccagtcagatatgttccgacggttccgattcccacaaacacagtgtacgcggcggccatcgggattttttgataagagcggatcaacaggataaagctgaccgcgattaagataaaaatgatgatccaatccaaaagcgaatcggcatgtttgagggaagaggcccaaacaacttctaaaagccctgcaataaaaacaagaacccaattcaaatgaaacacctccctattttatgaatgaacgtcagtcatttttagggcattaaaaaatgagcggtgttacccagtcattttttaagcagtgcctaagctccgttttaagaaagtgaaaatttcctttttatacacttcaacattttcatcttgttcaaatccgatatagaatcgttccgcagtattctcgaccaagttgataatcgttctggccgtccattttgaattgattccttccgttacctcatggtttgcaatggccttgttgatgatttgttcaagccaggaataataaggctgatagatcgtctcccatttttccatggagtggtcgatcgcaagcccggaataacagaggacaataatatccttatggcgttctgtaatgagaaatgtctcatcaattaatatatttaaaacggtccaaaaatcttcgtccccatgcagcctacctttgatttgatcaagtgtatgggtgagaagattttctgcaatggccggtatgagggcatttttagatgaaaaatacaaatagaatgttccttgggcagtgccggcctttttgacaatatcagaaatagaagctttgtcgaggcctttttcagaaatgacttctatggcagcctgcagaattttttcatatttgcccgatgtttgttttggcatgaggaacacctccaataatgactgactctcattcattttatcgcgtatatgtatgtttgtaaagaataaagaagcaagaaaacctcttgcttctttatttatcgtaatcaatggcggcttttgggagcccggtatactttgcccagtaataaatcgcaagtgagccgatcgcgactaaaatgaggtcgacgggattgctgataatccctaaaccatgtccgaaagaaccgatgtaggaaaagatcagcatcataatataaaacccgataagccaccaggctgatttcagctgctgagcgaggctgacatcttctttaggcgtatatttgctgaaacagagatagatcaaaaacatcacgagctgtgaaccgagcagccaggagactgttttccatcctgaccagtacacgataaacgctgtaaatataaaggaaagcggcccgataatgctcattccctttaaataaaacggcctgtttaagtccttcgcgttgaccctcagcgcagctgaagaaatgggtgcaatcgcatatgaaagaatgagcgcgactgaacagacattgacgagcgcgttccacgaaggaaagggaagtgtccagaaaatggacagggcaaacgaaagccaaagcgaagcgcggggtgtccccgtatctttattgacctttgagaatatgccaaataatgtgccgttacgcgcccaggcgtaaacaaggcgggatgtcgtattcataaagatattcccgtttcctccgggagacagaatggcgtctaaaatgacaagcgttgcaagccagcctaacccgagcatgaccgcaatatccttaaacggcaatgagaactcccggccaattgccggccagccatgtttcagtgtttctgtcgggattgcaccaataaaggtgacctgcaaaactgtataaatgatggttgaaacgatgatgcaaatgattaaagcgatcgggatattgcgttttggattttggacttcacctgctacagatacaatcggatgcaggccgagatacgcaaacatgacgccgcctgtcgagatggcagcctgaatacctgtaaatccaaacggtgcaaatccttgaacggataaattctccggctgaaaatgaaagatcagcacaataatgatggtaatcggcacaatatatttaaaaatcgatatgatgaaattcgccttagcgaaggttttgacgctccaataattcagcaggaaaaacaagcataatagggcaaactgcaagatccagccggaaatggtcggtgaatcagaccctttaatggtcaggccgggaaaccaataggccacatactggcgcacagctgtcacttcaattgaaatcaagcttgtataagcgacaatcgtgacaaacgaaattaagtagccgacaaggtggccatgtgaataaacggggtatcgaatgatgcctccggtacggggcagagcggctccgagctctgcatatacgagcccgattaacaaaataatggctcctccgaggatccaggaaaaagcgccggagggccctgcttttgaagcgacattactgacagcgaacagccacgctgatccaaagatggctcccatcccaatcaaaatcagatcaaacagcgacattgatttttgaaaatttccttgtttagacattcgcttcctcctttgaaaccagccttatattccttacaatgcccaatatgtaacagagaataccgctcctaataaaaaaacaggggcagcctgcgccgcccctgtttttattcatgaatcgaatcaaagtgtttcactgttatatttttgaaggaggctgtgccgccgtcagaataaagggtaattcctttatcttcaggctttgggaagacttcatttgaaaaaacggttttcccgtcgccaacaaaaacttctatcgttgttttatcgacaagtattttcaaatgcaccttacgtttgcttacatcataaggagctttgctttcgacataggtattgcttttgtcaggctgatttgtggctgctctattgacataagcatagccgccttcagcgaaaataccgacatcaatatggcgtttttggtcttctgattctctgagcctgacgcctgcattctttagctctgaccaagaaagatccgtatcaagctggtacgtatcacctgttatcgacaatgtttttgatccgttcacatcctgatcctctatttcgtcagttgaaacagtcagctgctccaaagcttcaatcggctgtgagacgaggctgtatgttccatcctgctccttcagccggagttcgcgtatgacagaatctgtgccgttaaagccgttcttcattgtcggggtgttgttggcataatcccaattgttcatccaggcaagcgcataccgcttttctaatggatctgtgcttttgctgtcttcgaacgtcacaccgccataccagtcgaagccatagtcaagccattgggcttcagtctgatccgctttgaattcttttccgtcgaagcttccggtccagtaggcgtacgtatttggtttgccccacggtttgccattcgcgctggcaccgagaacccacttattcgttccgtcgcttgcccgcatcatgtagaggtcgggacattccaccattcccgcctgttctgggaagaatccgcttgtgtaatgccagtccttaagattatcggattcataaaagccgatttttgatccttcagccatgaccatgacccatttgttatcctggtcatcccatatgactttcggatctctgaaatcgtctgtacccggattaggcataacggggttgccactgtagaatttgaatgattttcccttatctgtgctgtaccacaaatattgttcctgttttttgtctttggctgagggctgtgtcacaatcgcgacaagcgcatttttcccaaagccggctgtgttctctttatccaccacgacggaaccggtccaaatgtcaccgtccgggtttgtatatttcggaatcgccacgccttcatcggtccagtgcaccaaatcagctgagacggcatggcgccattctgtgccgttgccttttgggtaatcccggttatatagatagaaataatgatacttgccatcaaaatagatcggtttttgagggtcatttttccatttatccggcgtcgtaaaatgatatgccgcccggtagtccggcttctgttttgattttgttttttggtcatgttcttcttttggaaataagtcgataaacagcaatattcctaaaaaggttaggaatgaggttagccatttgcctgcttttatatagttcatatgggattcacctttatgttgataagaaataaaagaaaatgccaataggatatcggcattttcttttgcgtttttatttgttaactgttaattgtccttgttcaaggatgctgtctttgacaacagatgttttcttgcctttgatgttcagcaggaagcttggcgcaaacgttgattgtttgtctgcgtagaatcctctgtttgtcatatagcttgtaatcacgacattgtttcctttcgcttgaggtacagcgaagtgtgagtaagtaaaggttacatcgttaggatcaagatccatttttaacacaaggccagttttgttcagcggcttgtatgggccagttaaagaattagaaacatagccaagcatgtaaatatcgttagacgtgatgccgtcaatcgtcatttttgacccgcgggagtcagtgaacaggtaccatttgccgttcattttaaagacgttcgcgcgttcaatttcatctgttactgtgttagatgcaatcagcggtttcatcacttttttcagtgtgtaatcatcgtttagctcaatcataccgagagcgccgttagctaattcagcagtgcgttttttatcactttgcagaagcttttgactttcttgacggaagaatgatgtgcttttgccatagtatgctttgttaaataaagattcttcgccttggtagccatcttcagttccagtgtttgcttcaaatactaagtatttgtggcctttatcttctacgtagtgaggatctctcagcgtatggttgtcgcctgagctgtagttgccttcatcgatgaactgctgtacattttgatacgttttgccgtcaccgtcaaagattgatttataatcctctacaccgttgatgttcaaagagctgtctgatgctgatacgttaacctgtgcagttgtcagtgtttgtttgccgtaatgtttaccggagaaatcagtgtagaataaacggatttttccgtcagatgtaaatgtggctgaacctgaccattcttgcgtttggtcttttaggatagaatcatttgcatcgaatttgtcgctgtctttaaagacgcggccagcgtttttccagctgtcaatagaagtttcgccgactttttgatagaacatgtaaatcgatgtgtcatccgcatttttaggatctccggctaatgcaaagacgatgtggtagccgtgatagtttgcgacagtgccgtcagcgttttgtaatggccagctgtcccaaacgtccaggccttttgcagaagagatatttttaattgtggacgaatcgaattcaggaacttgatatttttcatttttttgctgttcagggatttgcagcatatcatggcgtgtaatatgggaaatgccgtatgtttccttatatggcttttggttcgtttctttcgcaaacgcttgagttgcgcctcctgccagcagtgcggtagtaaaggttaatactgttgcttgttttgcaaactttttgatgttcatcgttcatgtctccttttttatgtactgtgttagcggtctgcttcttccagccctcctgtttgaagatggcaagttagttacgcacaataaaaaaagacctaaaatatgtaaggggtgacgccaaagtatacactttgccctttacacattttaggtcttgcctgctttatcagtaacaaacccgctcgatttacttttcgacctcattctattagactctcgtttggattgcaactggtctattttcctcttttgtttgatagaaaatcataaaagtatttacggtctacgggcctaaagaactaaaaaatctatctgtttcttttcattctctgtattttttatagcttctgttgcatgggcataaagttgcctttttaatcacaattcagaaaatatcataatatctcatttcactaaatagtagtgaacgacaggtatacgtgatgggttaaaaaggatctctaactgaagggtttttcaaaatatttgaaacgttagtaggttagtaacgtacagagatatgggaggtggaggaatgaagcagaataaaagaaagcatcttcagacgttatttgagacattaggcgaaaaacatcagtttaacgggacggttctggctgcggagggtggcgatattttatatcaccactcttttggctatgcggaaatgacggaaaaacgcccgttgaaaaccaactctttgtttgagttagcgtctttgtcaaagccttttacagcattgggaatcatcttgctggaggagaaggggattcttggctatgaggataaagtggatcgctggctgcccggttttccgtatcagggcgtaacgattcggcatttattgaaccatacgtcagggcttcctgattatatgggatggttttttgccaattgggattcacacaagattgcggtgaatcaggatattgtcgatatgctgatgaatgaggggctatctggttattttgaaccgaatgaaggctggatgtacagcaatacggggtatgtgctgctggcggttatcattgaaaaagcatctggcatgagctatgcggattttatgaaaacaagtatttttttaccggcaggcatgaatgaaacaagagtgtataacaggaggctttcgcctgagcgaattgatcattatgcatatggatatgtgtatgatgtacattccgaaacatacgtcctccctgatgagctggaggaaacgaactatgttgtgtatctcgatggcatacagggggatgggaccgtgaactctgtcacaagcgatttgtttcgatttgatcaggctttatatcaggacgatttcatcagcaaggcttctaaggaatctgcgttttctccagtgcgcctcaacaatggagaaacaattgattatggctttggctgggtactgcaaaatagtcctaaaaaagggcggattgtcagccacagcggaggatggcccggctattcgacgttgatgatccgatatatcgatcatcgtaaaacgctgatctatttgagtaataaggaagaggatactgaatatgaacaagcgattctgaaggcggcggaacatattctatttggccagccatatgaggtcccggaacgtcctgctgataaaaagaaaaaagcaattgatacggcgatatacagccgctatgttggcagctacctgttgcaggatggaacggctgcacaggtgacagccgagaatgaacggctttatttggagatcaccggacagctgagactggagttatttccttcctcggaaacccgtttctttctgcgagcattgtctgttgaagtcgagtttatgttaggcggggatgctgcgaaaagctttatcctctatgaggatggctcagaagaagaagcggtccgtacaaattagaaaggaatgaatttgatgatcggaatattagccggaatggggccgaaatcgacctcgccgtttattgataaggtgattgattactgtcagaagctgtatggggcttcaaacgatattgactacccgcacatgatgatctattcatgcccgacgcccttctatgcagatcgtccaattgaccatgacgagatgaaaaaagcgattatcgacggagcggtaaagctcgagaaaacaggcgtggatttcattgcgctgccttgtaatacggcgcatgtctactatgaagagattcagcaggcattgtcggttcctatgttgcatatcgttgaggaaacgataaaagagattccgcatcctgcaaaaaaagcggtggttttaggaacagagccaaccatccaatccgccatctaccaaaaagttctgaaggcaaatggacaagaagttgttcacaaggaccattggcagcaggctgtgaaccagcttatcgccgcaatcaaacagccaaatcatatgcagcattcaaaagcattgtggcagacgctatatgaagaaatcagtcagcatgcagacatcatcatttcagcctgcacggatttaaatgcggtgttagatcatactcaaagtgagattccgattatagattcctctgcctgtcttgccaaaagcactgtcagcacatatcttgcttatcaaagctagcttcagacaaggactgtcttcaaacagtccttgtttttttatgttcctattgtttgacagttaactgcaatgatgttaaagtaaacatgtaaatagttacatgatttttttctgaaggtgaggtggttctcgtgaagaagccggttttaaaaccattcgcctctttagaaatcaaggttgatccgcctatcacgattggtgagacaagcctgggactgagacgattcattccgattcgttcgggaacaataaccggggaagtaaagggacgtattttgccgagcggtgccgattcgcaaatgattcgcgctgacggcagaaccgatttatctgccaggtatgtgatcgaaacagcagatcatgaactgatttacattgaaaacaatggaatacggcaagtcagcgagccgtttcgaaaacaagcggcagccggggaaattattgatccggagcatgtttatttccgtacggtaccgacgtttgaaacaggcagtgaagcctatcaatggctccatgaccgcttgtttatcggttccgcagaaagaacccctgattacgttcgactagacatttatgaagtgcagtaaaagactaaggagagtgtgaaaaatggaaaactttatcggaagccacatgatttatacgtatgaaaacggctgggaatacgagatttatattaaaaatgaccatacaattgattatagaattcatagcggaatggttgccggacgctgggttcgggatcaggaagtgaatattgtcaaactgacagaaggcgtatataaagtgtcttggacagagccgactggcacggatgtttcattaaactttatgccaaatgaaaaacgcatgcacggcattattttcttcccgaaatgggtgcatgaacatcctgaaattacggtttgctaccaaaatgaccacattgatttgatggaagaatcccgcgaaaaatatgaaacgtatccaaaatacgttgtacctgaatttgcggaaattacatttctgaaaaatgaaggagtcgacaacgaagaagtgatttcgaaggctccttatgagggaatgacagacgatattcgcgcgggaaaattataataaacataaaaaacccggaaaagagaattacttctcttttccgggttttctttttgctgagtatgcgggaaccatcacaattcccgcgaaaaacagtatgatgccagtccagcacataggctggtaatagactgtgtcccgtaaacataccacggccgacaaaataatgatacaagctgccacaacaatggcagcaccaatgtatcctgttttccccatatttattctccttttgaagggaatagcttctgccttttttcagattcgggatcgttttcgatcgtaatctctgagtctaaaatcagcgtctctctcgtttcttcatgatacgccggccaattcacagcttcggtgcttgggtttcctgttttagcgaacgtgatccacgctgattgtatcgtgtgagaaagctgtttcacctcatccgtaatctccgcttttgccattcgttccaatccgtccagatttccaaagacaaaaggaagctctaatgcgtgaaacgctttattgtacggcggcttctccgggtgccaatcgaacctgtacatccagacaggggtgtaatgagactgtgcggatgcataggcgacggcagggcgccaaaataataaatcagtcatcatatgaatttggctttccagagaacgcggatacaaatcggcagctttctctgccagcggcttccctagtaaatactcgagtgctgcatcaagcgtttcctgagaatgaacgtctgaatccggggtgaaaaataaatatccttcatcacgggttgttccaatcaatagcggaatgccggaagcagccccttctgcgatcgctttttctggttcttcaggcagcgtttttggatcaagggcgggctggaagaacagctgaaagatattttctttttctgcaatccgaagctgatcagccgcttttagcaaatcttccgcagaaaccgtatgcaatttatccagttggccctcgttaatcccaaggacctgtaaaaaggctgccgaggtgctcgccgcttgttctttcgtcatcgttcgagaagcgccgctttccatgattgctttctggaacagtccttttgccgcaggcatagtgagaagcgcggcaatgctcatcccgccggcggattctccaaatactgttacgttatcgggatcaccgccaaacgctgagatattctctcgcacccatttcagtgcggcggcttggtctaaaagcccaaggttatcggaatacgcctcatcaaatgaagacaagtgcaaaaagccaaacgggcccagccgatagttcagtgtaacgacaatgacctctccctgcgccgcaagttttgatccgtcatacaatggctcactgcccgctccaagataaaaagcgcctccgtgaatccacaccatgacaggcaggttttgacttggagtgtcaggcgcaaatacattgagatacaagcaatcctcggactggcgcggcagttcagcatacgatagtgacagcaaatcagacggctgcgggcaaacagggccgtacgctgtggcatcaaggacatcttcccacacttcaggcggctcaggtgctttaaaacgccattgtccgacaggcggcttggcaaaggggattcctttccacttatgtacgccgttttccgttgtgccttttactttgccgtattgagtcgttactatttgatgagtcattgtgttctctccctttttcacccattataaacagatttaccctgcagatgcgaacgttagcccttaaccgatcatcatcttcccattgtttttaaaaaggatttgacttcatggacagtcaggccgatttctcttgcttccgccatcagcgctttccattcttctatattggattccgtcagtttgcggttgcggtaagaggcagtttcaggctgttctttctttagcctgttcgtaaaagtgaacaattcttccttttccatcccggcttgtacggcttgcactaaatgtacgcgccattcttcttcaccgccgctgattttttcatacatcattgtttctgcgtcaaataattctgttaattcaacttccagtgtggcagaaactttttttaaaaattgaacggacggattcgtgtgaacgcctctttcaatcttgcttaaataggatttggatacgcctgactcaacagccagctgattaatagaatagccttttcttttacggtacaaacggataattcttccaatcataatatgaaattctcctctattcctgtcgttattttgttcattataaggaatttttcgttctttataaaatttaaaataataagggaagtgcagtaaattagaggaaaatcatgattttgttctctaaagagaacttattggcttattttgcaatttttaaataataacgttttcttttataatccaatcattaacagaaaggggcgcgggaagccagccgcgggaaggctgaaggctatgaatacatgaatgagaatatgagtttcaaagaattatatgcgattgtcagacacagattcgtgctgattctgctcatcacaatcggcgtcacccttattatgggttttgtgcaatttaaggtcatttcaccgacctaccaggcgtcgacacaggtgctggttcatgaatcagacggtgaagaaaactcgaatctcagtgacatccagcgaaatcttcagtatagcagcacgttccaatcgattatgaaaagcactgccttgatggaagaagttaaggcggaattgcacctatctgaatcggcttcctcgctgaaaggaaaagtggttaccagcagtgaaaatgaatcagaaattattaacgttgccgttcaggatcacgatccggcgaaagcggctgagattgcgaacacgttagtgaacaagtttgaaaaagaagtagatgaaagaatgaatgtacaaggcgtacatatattatcagaggcgaaggcttctgaaagcccgatgatcaagccggccaggctgcgaaatatggtcatggcttttggcgctgctgtcatgggcggcattacactggcattttttctgcattttctcgatgatacatgcaaaagcgcacggcagctcagcgagagaaccggattgccatgcttaggctccgttcctgatgtccacaaagggcggaatcgcgggataaaacatttcggggagtgaagcgagtgatctttagaaaaaagaaagcaaggcgaggtttggctcaaatatctgttttacacaataaatcagttgttgcggaacaatatcgcaccattcggacaaacattgagttctcatctgtccagaccaacttgcgatctatcctcgtcacctcctctgtgcctggtgaaggtaaatcgttcagtgcagcgaatcttgcggctgtctttgcgcagcagcaggaaaagaaagtactgctggtggatgccgatttaagaaagccgaccatcaatcagacgtttcaggttgataatgtaaccggactgacaaatgtgctggtcggcaatgcttcactcagtgagacggtgcaaaagacgccgattgataacttatatgtactgacaagcgggccgaccccgccaaacccggcagaactgctgtcttcaaaagcaatgggagacttaatatctgagatctatgaacaattcagcctcgtcatctttgattcccctccgcttttggctgtttcagatgctcagattctagcaaatcaaacagacggcagcgtgctcgtcgttttaagcggaaaaacaaaaaccgataccgttctgaaagcaaaagatgcactggaacaatccaatgcgaagctgttaggcgctcttttaaacaaaaagaaaatgaaaaaatcggaacactattcctactagtttttgtaaaggtgatgtctcctgacctgtatcaatggaggcactcggctctgctgtgggcagctgaagttgctgccttagatgctggtcgtcgctggcggggcgtgaggatgggttaaatgcccacttatctcatatatacataggaggtattgtcggtttagctgctgccgattttttggagagacgaaaaccgccgcagctaaaccgataaaagaattaggggggaaaaggttgagttaccggagaagactgtcaatgattattgcgctggatacttacctcgttttaaattcagttattgcaggatatcaatttttaaaagattcctatcaattttatgactccggagcattactgcttaccgctgtcagcttgctcctcagctatcatgtgtgtgctttcctgttcaatcagtataaacaggtgtggacatacaccggactcggcgagctgattgtcctgcttaagggcattacgctttccgccgctgtgaccggtatcattcagtatgctgtgtatcatacaatgttcttccgtctgttaaccgcgtgctgggtgcttcagcttttgtctattggagggacccgtattttatccagagtattaaacgaaagcatcaggaaaaaacgttgcgcctcgtcccgcgcgctgattatcggggcgggctcaggtgggactctgatggtcaggcagctgctttcgaaagatgaacctgatatcatacctgtcgcttttattgatgacgaccaaacgaagcataaattagaaattatgggactgcccgtaatcggcggtaaagaaagtatcatgcctgcggtgcaaaagctcaaaattaattatattattattgccattccttcactccgcacccatgagcttcaggtgttatataaagaatgtgtgcgaaccggagtaagcattaaaattatgcctcattttgatgaaatgctgcttggcacacgaactgcaggacaaatcagagatgtaaaagctgaggacttgctcggcagaaagccggtaaccctcgacactagcgaaatttcgaaccgcatcaaaggaaaaacagttctcgtcacgggagcgggcggatcaatcggctcggaaatctgccgtcagatcagcgcgtttcagcctaaggaaattattctgctcggccatggggaaaacagcattcattcgatttatacagagctgaacggacgattcggcaaacacattgtgttccatacggaaatcgctgatgtgcaggaccgcgataaaatgtttaccttgatgaaaaaatacgagccgcatgttgtctatcatgcagctgcccataagcatgtgcctttaatggaacacaatccagaagaggcggtcaaaaacaatattatcggaacaaaaaatgtcgcggaagcagccgatatgtcgggaacagagacattcgtgctgatttcatcggacaaagcggtgaacccagccaacgtaatgggggcgacaaaacgattcgcagagatgattattatgaatctagggaaagtcagcagaaccaaatttgtcgctgttcgcttcggcaatgtactcgggagccgcggcagcgtcattccaattttcaaaaaacagattgaaaaaggcggcccggtgacagtaacacatccggcaatgacccgctatttcatgacgattcccgaggcatcaaggcttgtgattcaggctggggcactggcgaaagggcgtcagattttcgttctcgatatgggagagcccgtaaagattgtggatcttgccaaaaacctcattcatttgtccggctacacgactgagcaggttccaatcgaattcacaggcattcgtccgggcgaaaaaatgtatgaagaattgctgaacaaaaatgaagtccatgctgaacaaatctttccaaaaattcacatcggtaaagcggtggacggcgattggccggtgctgatgcgctttatcgaggattttcatgagctgccggaagccgacctgagagcgaggctgtttgcggcaatcaatacatcagaagaaatgacggctgccagcgttcattagggggagtgaaaatgacgaaaaagatattgttttgcgcgactgttgattatcattttaaggcctttcacctcccttattttaaatggttcaaacaaatgggctgggaggttcatgtcgctgcgaacggacaaaccaagctgccgtatgtggatgagaaattctccatcccgattcgcaggtcaccttttgatcctcagaacctggccgtttataggcagctgaagaaagtgattgacacctatgaatacgacattgtccattgccatacaccggtcggcggcgttctcgccagactggcggcgaggcaggcacggcggcacggaacaaaggtgctgtacacagcgcacggatttcacttctgcaaaggggcaccgatgaaaaattggcttctttactatccggttgagaaatggctttcagcatatacagactgcctgattacgattaatgaagaggattacatacgggcgaaaggacttcaaaggccgggcggaaggacgcagaaaattcacggcattggcgtcaacaccgagcgtttccggcctgtcagtccgatagagcagcaaagactcagagaaaagcacgggttccgtgaagatgattttatattggtttatccggctgagctcaatctgaacaaaaaccagaagcagttaattgaagccgcagccttgctaaaagaaaaaattccctcactccgccttgtgtttgccggggaaggggcaatggaacatacgtatcaaacgttagctgaaaagcttggtgcctccgccaatgtctgtttttacggcttttgcagcgacatacatgagttgattcagcttgcggatgtatctgtcgcatccagcattagagaaggcctcggtatgaatgtgcttgagggaatggcggcagaaaaaccggcgatcgctacagataatcgcgggcatcgggaaatcattcgcgacggagaaaacggttttctggtcaaaatcggtgacagtgctgcttttgcccgccggattgaacagctttaccataagccggagctctgccgaaagctgggacaggaaggccgaaaaacagccttgcgcttctcggaggcgcgaacggtggaagaaatggcagatatttattccgcgtacatggatatggatacaaaggagaaaagcgtatgaactcaggaccgaaagtttctgtcattatgggcatttataattgcgaacgcactttggcagaaagcatagaatccatactcagccaatcctataaaaattgggagctgattttgtgcgatgatgcgtcaacagacggcacgctccgcatcgcgaagcagtatgccgctcattacagcgaccgcatcaaactgattcaaaacaaaacaaataagcggcttgccgcatcattaaatcattgtctttcgcatgcgacaggcgattatatcgcacgtcaggatggagatgacctttcgtttccgcgccgtctggaaaagcaggtcgcgtttttagaaaagcaccgacattatcaggtggttggcaccggcatgcttgtgtttgatgaatttggcgtaagaggcgcccgcattctgccttctgttccggagccgggcatcatggcaaaagggaccccattttgccatggcacgattatgatgagagcgagtgcctaccgcacgctgaaaggctaccggtcggtgcggcggacgagacgaatggaagatattgatttgtggcttcgcttttttgaagagggcttcaggggctataatcttcaggaagccttgtataaagtgagggaagacagcgatgcattcaaacggcggtcatttacgtattcaattgacaatgccatccttgtctatcaggcgtgcagacgcttgaagcttcctttatctgattacatatatatcgcaaaaccgttaatccgcgcgtttatgcctgcagccgtgatgaatcgctaccataaaaaaagagtgatgaaccaaaaggaagggcttgtcaagcatgaatagcagccaaaagcgcgtactccatgttctcagtggcatgaacaggggcggcgcggaaaccatggtgatgaatttatatcggaagatggacaaaagcaaagtgcaatttgattttttaacgtatcgaaatgatccgtgcgcttatgatgaagagattttatctttaggcgggcggcttttttatgtcccgagcattgggcaaagcaatccccttacatttgtgaggaatgtgagaaacgcgataaaagaaaacgggccgttcagcgccgttcatgcgcacacggatttccaaacgggttttatcgcccttgcggcaaggctcgccggagtgccggtcagggtatgccattcccacaatacgtcttggaagacaggcttcaactggaaggatcgcttgcagctgctcgtgttcaggcggctcattttggcaaatgcgacagcgctgtgtgcctgcggagaggatgcgggcaggtttttatttggacagtccaatatggagcgggagcgtgttcaccttcttcctaacgggattgaccttgagttgttcgccccaaatgggcaggcggctgatgaagaaaaagcagcacgcggcattgcagccgaccggctcatcattggccatgtggcccggtttcatgaagtgaaaaaccacgcgttcctgctgaagcttgccgcacatctcaaggaaagaggcgttcgctttcagctcgttctggcgggagacgggccgttgcgcggggagatagaggaggaggcgcgccggcagaatctgctatcagatgttctctttttaggcactgaagaacggatccatgaattgatgcgcacatttgatgtgtttgtcatgccgtctctgtacgaaggcttgccggttgtgcttgtggaagcgcaggcgtcggggcttccatgcatcatttcagacagcattacagaaaaagtcgacgccggtctcgggcttgtcacaagattaagtctttctgaaccgatcagcgtctgggctgaaaccattgcaagggcggccgccgcaggcaggccgaagcgtgagttcatcaaagaaacactcgctcaacttggctacgatgcacagcaaaatgtaggagcgctgctgaatgtatacaacatcagcacggaaaaggaccataaccgatgattgtatatgccgtcaatatggggattgtatttatttggtcttggttcgctaaaatgtgcggcggccgtgacgattcgcttgccacggggtatcggccgaataagcttttgatctggattccgctcgcttcacttgtgctcgtgtcaggtctccgctatcgagtcggcacggattttcagacgtacacgctgatgtacgaattggcgggcgattatcaaaatgtgtggcagatattcggtttcggcacagcgaaaacagcgacagatccggggtttaccgcactcctttggctgatgaatttcatcacggaagatcctcaaatcatgtattttacggtggcggtcgtgacctacagctttattatgaagacactcgccgactatggcaggccgtttgagctgagtgtctttttgtttttgggaacctttcattactacgcgtcttttaacggcatcaggcaatacatggtcgcagctgctttgttttgggcgatccgttatatcatcagcgggaactggaagcgatatttcctgattgtgctggtcagctcgctctttcattcgtcggcgctgattatgattccagtgtactttattgtcagaagaaaagcctggtcaccggcgatattcggcctatccgctttatttctcggcatgacatttttatatcaaaaatttatttctgtgtttgtcgttgtacttgaaaacagctcatacagccattatgaaaaatggctcatgacgaacacaaatggaatgaatgtgatcaaaatcgctgttttggttctgccgctgttccttgcattttgctataaagaacgattgcggagtctgtggccgcaaatcgatattgtcgtcaatttgtgcctgcttggttttttgttcggccttttggccacaaaggacgtgatttttgccagattcaatatttatttcggtctgtatcaaatgatcttagtcccttattttgtcaggatatttgatgaaaaatcgaacgcccttatctatatcgctatcgttgtttgttattttctttacagttatttgcttatgccggttgattcatcggttctgccttacagaacgattttttcccggtaatttatgcacgaggagccggtcattatggaaacacctgcggttagtctgttagtcgctgtttataacacagaaacatatatcagaacgtgtctcgaatcactgcggaaccagacagtggacaatattgaaatcatcattgtcaatgacggttcagctgacgccagcccggatatcgcagaagaatacgccaaaatggacaacaggttcaaggtgattcatcaggaaaaccagggactcggtgcggttcggaataaaggcattgaagcggcacgcggcgaatttatcgcgtttatcgattcagacgattggattgagcctgattattgcgagcagatgctccgggcagcaggcgatgaaactgatctggtcatttgcaattacgccgcagagtttgaggacactggcaaaaccatggactcagacattgcccaaacctatcaggatcagccgaaggagcactatatcaaggcgttattcgaagggaaggtcagagggttttcatggaacaaactgtacagaagaagcatgattgaagcccatcggctgtcgtttccgctccgaggcgagctggagcatgtcgaggatcagtttttcagcttcagggctcactttttcgcccgctcagtatcctacgtaaaaacgccgctctatcattatcgaattcacctttcctccattgtgcagcgctatcagaaaaaattgtttgaatcaggacttgcgctgtatgaggcgaatgcggcgtttttacaggagaacaacaaactggaggagtatcgcaaggagcttgatacctttatcgttcttcacagcagcatctgcatgctgaatgaatggaaaacgagcggcagccgccggctgtttgaaaagcttagaaatgttggcgtgatatgcgcggacccggtgtttcaagaaagtctttcaaaaacgggtaccgctccttttgacgcaaaacggtcatgcctgcttctgatggcgaaatacagaatgattccgttcgtcgctatggcatcggctgtgtatcagcgggtgatcgagtacaaaatgagaaacagagggtgaggacatgtcgttacaatcgttgaaaatcaattttgcagaatggctgctgctaaaggtcaaatacccgtcccaatattggctgggagcggcagatcaaccggtaaaggccgcagcacatcagaaaaaaatcatactgaccctgctgccgtcccatgacaatttgggagatcacgcaattgcttatgccagcaaggcatttcttgagcaagaatacccggactttgacatcgtcgaggttgatatgaaggacatttacaaatcagcaaaaagcctgatccgctcgcgccatccggaggatatggtctttatcatcggcggcggaaacatgggggatttataccgttatgaggagtggacgcgccgcttcatcattaaaacattccgtgactatcgggttgtccagcttccggcaacggctcatttttctgacacgaaaaaggggcgcaaagagctgaaacgggcacagaaaatttataattcgcaccccggcctgttgctgatggcacgggatgaaacaacgtatcaatttatgaaacagcattttcaagaaaaaataattttgaaacagccggacatggtgctgtatttagacagaagcaagacccccgcagaacgcgaaggggtttatatgtgtttgcgcgaggatcaggaaagcgtgcttcaggaggaccagaggaaccgggtcaaggctgcgctatttgaggaattcggcgagatcaaatcctttacgacaacgatcggccgccgggtcagccgcgatacacgcgaacatgaacttgaagcactgtggtctaagctgcaaagcgcagaagccgtcgtcactgacaggcttcatggcatgattttttgcgcgctgacaggaacgccgtgtgttgtcattcgctcctttgaccataaggtaatggagggctatcaatggcttaaagacatcccgttcatgaagctgatagaacatccggagccagagcgcgtaacagccgcagtcaatgagcttttaacaaaagaaacaccccgtgcaggctttccgagagatgtgtattttaaaggtctgcgtgacaaaatcagcggtgaagcgcaatgatcccgctcgtcagcattattgtcccgatgtataatgttgaaccatttatagaagagtgcattgattctttgcttcgtcaaacgctttctgatattgaaatcatcctcgtgaatgacggaacaccggatcgttcaggcgaaattgcagaggactatgcaaaacgggatgcgagaatccgggtcattcatcaggcaaatggcgggcttagttcagcgcgaaatacgggaatacaggccgcgcggggcacttacatcggctttgtagacggagacgattatgtatcatccgccatgttccagaggctggctgaagaagcggagcaaaatcggctcgacatcgtcggctgcggtttttacaaacagtcatcggacaggcggacatatgtgccgccgcagcttgaggcaaaccgcgtgctgacaaaacgagaaatgactgaacggcttaaacatgctcacgaaacgagatttatctggtatgtatggcgttatctttaccgtcgtgagctttttgaaagggcgaatctgttgtttgatgaaaacatccgttttgctgaagactctcccttcaatttgtccgctttttacgaagcggagcgggtgaaaatgcttgatgaaggattgtacatttatcgtgaaaacccgaacagcctgacagaaatcccttataagccggcgatggatgaacatcttcaaaaacaatatcaagctaaaatcgcattctacaatcactacggcttagcaggcgcatgccaagaagatttgaatgtgtacatttgcaggcaccagcttccgatgcttttggcaaatgcctgtgcttctccgaattcgccgaaagacatcaaaaagaagatcagacagattttatcctatgacatggtgcggcaggctgtcagacatacaccgtttcagcatgagaaattattaagaggagagcgtttggtattagcactgtgtaaatggcggatcacttttctcatcaagctgtttttcgagcagcgggggaaaatgaaaggcagtgcgaagcaggcatgaaattcacgataaatttcagcgctaatctcacggcttttctcttgtccgttttcctatcggtttggatgacgccttttattgtcagtacgcttggtgtggaagcgtttggctttgttcacttgacacaaaatgtgattaattacttttcggttatcaccgtggcgctcagctcggttgtcgttcgattcttttctgttgctgcccacaggggagagcgggagaaagcaaatgcgtatatcagcaattatttagcggcctctgttttgatttcattgctgctcttgctgccgcttgcgggttcggctttttttattgaccgcgtcatgaatgtgccgcaagcgcttttggcagatgtgcgcttgtcgattttgatcggcagtttgctgtttattttaacgtttctgatggcgggtttcggtgctgcaccattttatgccaaccgcctttatatcaccagttccattcaggcggtgcaaatgcttatacgggtgctgtctgtgctgctcctgtttgcatgctttgcgccgaaaatctggcagatccagcttgcagctttagctggtgctgtcattgcgtctgtgctgtctttctatttcttcaaaaagctgattccgtggttttcgtttcgtatgaaggatctttcattccgcacaagcaaggagctgtttcaagcgggcgcatggagctccgtcaatcaaatcggcgtcctgctttttttgcagattgatctgttaaccgccaatttgatgctgggggcgtccgcatccgggaaatacgcggcgattatccagtttccgctgcttttgcgcagcttggccggaacggtcgcatccctgtttgcgcctatcatgacttcatattattcaaaaggcgatatggaagggttgatgaattacgccaataaggcagtaaggctcaatggtcttttgcttgcacttcctgctgccttattgggcggattggcgggaccttttttgacaatctggctcggaccgtccttttcaacgatagcaccgcttttatttattcatgccggatacttggttgtcagcctcgcctttatgccgctgttttatatatggaccgcttttaatcaacaaaaaacaccggcgattgttaccctgctgttaggtgcggtgaatgtggtgctggcggtcacgctgagcgggccggctcatctcggtctgtacggcataacgttggcaggggccatttctcttattttaaaaaatgccatctttacgccgctttacgtatcccgcattacaggctacaaaaagcacgtgttctttaaaggcataatcgggcctctttcagccgctgtatttgcctggacggtctgtaaggcaattcagttcgttgtgaagattgacggctggccgtcactgatagcgacgggagtgacagtcagcttttgctacgctgttttcgcttttatgctcgtttgtacaaaagaggaaagacagctggtattaaaacggtttcgaaaaacgaaaggagctgtgaatctttgatcctgaaacgactttttgatctgacggccgccatttttttgttgtgctgtacaagtgtgatcattctgttcaccatcgccgttgtcaggctgaaaataggatcacctgtcttctttaagcaagtaaggccaggcctgcacggcaaaccgttcaccctatataagttccggacaatgacggatgaacgggacagtgagggaaatctgctgcccgatgaagtccggctgacgaaaacgggcaggctgatcagacagctgagcattgatgagcttccgcagctcctgaatgtcctgaagggcgatctgagccttgtcgggccgcggccgcttttgatggactatctgcctctttatacagaaaaacaggcacggcgccatgatgtgaagccgggtatcacaggctgggcgcaaatcaatggcagaaacgcgatttcctgggaaaagaaatttgaattagatgtatggtacgttgacaaccggtcattttttctcgatttgaaaattttatgtttgacggtgcgaaaggtccttgtttcagaagggattcagcaaaccaatcatgtgaccgcggaacggtttaccggaagcggagatgtgtcctcatgaaaaacgtggccattgtgggtgacggcggacacggaaaggtgatcagagagctgataaacgcccgctcagatacgcgcttagccgcggtgctggatgataaattcaaaacgttcgaaggcggaaaagaatggtacacaggaccgccggaagccgttactgaactgcgcaggctcattcctgatgtgctgtttctgattgctgttgggaataacagtgtcagaaaacagctggcggagcgactgggactgaggaaagatgattttattacattgattcacccgtcagccatcgtcagcaggtcggctgtcattggggaagggacagtgattatggcgggcgcgatcattcaggcggatgcgcgcatcggcgctcattgcatcatcaatacgggtgcagtggcagagcacgacaatcaaatcagcgattacgttcatctgtccccgcgtgtcacgctgtcaggagcggtttccgttcaggaaggcgctcacgtcggaactggtgcatccgtcataccgcagatcataatcggggcttggagcattgtcggagccggctccgcggtgatccgtcccataccggacagggtaacggcggccggtgctccggcacgcatcatttcttccattcaaacatcaaacaaaggatgattctatgcataaaaaaatctacttatctccccctcatatgagcggcagggagcagcactatatttcggaagcctttcgctcaaactggattgcgccgcttgggccgctcgtgaattcatttgaagaacagctggcagaacgagtcggtgtaaaagcagctgctgcggtcagctcaggaacggcggcgattcatctcgcgctgcgtttacttgaggtaaaagaaggtgacagcgtgttttgccagtccttcacatttgtagcaaccgccaatccgattctatatgaaaaagcggtgcccgtctttattgattctgagcctgatacgtggaatatgtcgccgacagcccttgaaagagcattggaggaagcgaaaagaaatggaacactgccaaaagcggtgattgccgtcaatctatatgggcagagcgcgaaaatggatgaaatcgtaagtctgtgcgatgcatacggagttcctgtcattgaggacgcagccgaatctctcggaacagtctataaagggaagcaaagcggaacattcgggcgcttcggcattttttcatttaacgggaacaaaatcattaccacatcagggggagggatgctcgtttcaaatgatgaagccgcaattgaaaaagcaagatttctcgcttcgcaggcacgagagccggctgttcattatcagcacagtcaaattggacataattacaggctgagcaatatcttagccggcgtcggcattgcccagcttgaggtgctggatgagcgagtggagacaagaaggaccattttcacgagatacaaaaatgcgctcggtcacatagacggcgtccgctttatgccggagtacgcagcaggcgtatccaatcgctggctcaccacgctcacacttgataacgggctcagcccatatgacatagttcaacgtcttgctgaagaaaacattgaagcccgtccgctgtggaagccgctccatacccagccgctattcgatccggctttattttattctcatgaagatacaggaagcgtatgcgaagatttgttcaagcgaggaatctgtctcccatcggggtccaatatgacagaagatgagcaagaccgggtcattgaagtgctactgcacttattccaaactgccgaggtgaagaaatggacagcaagcattcgatgatcagcctgaaacagaaactgtccgggctgctcgacgtcataccgaaacaatcagagattatatatgctgactatcctctatatgggaatgtaggggatttatttattatgaaaggaacagaagccttctttaaagaacacgggattcgggtcagaaaacgctggaatcctgacaattttccagtcgggcgaaagctggatcctcatctcatcatcgtctgccagggaggcggaaacttcggggatctgtatccgtattatcaaggctttagagagaaaatcgtccaaacctatccgaaccacaaaattgtgatcctgccgcaatcgatttattttcaaaacaaagacaacctcaaacggacggcagagatattttctaagcatgcgaaccttcacattatgacaagggaaaaagcctcctatgctacggcgcaggcttatttttcaagaaatcacattcagcttctgcctgatatggctcatcagctgtttcccgtcattcccacgcagcagccgtccaatcaaaagctgagatttatccgaacagatcatgaagcaaaccaggcgcttcaggaacacgcagaagcggaaagctacgactggcgcacggtgctgtcagcttcagaccgccggacgattgcttttctccaaacgctgaacgtcctgaataaaaaagcaggcaaccctttgcccattgcgtatatatgggaaaaatactcggattatatcgtccaaaaagccattcggtttttcagccgttacgaatcggtggaaacatcaaggctgcacggccacatcttgtcttctcttcttcaaaaagaaaacacggtcattgataattcctatgggaaaaacgccaattactttcatacctggatggaaggagtgccgagcacccggctcatccagcacgcctcaaagaaggaaaaccttcctgctcacatgtgagcggaaggtttattttgattctccacgtttgactttgttgtatgcttcatctaaatgctgaatccgtttcaggacaactgcgtttttcgtcagctggtcctgcactagtgttgagacgacggaacggtagtagctgttcatcgcgtggattttatcctcagactgattcatttcaatatgctgttttaaattctcaataaaataagggacggaaaaaagttcagacatttctttggcagctcctttttcataaatgtatacggtgtgatctcaatcatgtacaatgaagaaaggggagtgagcaagatggatatgaaacttcagcaagtacaagtattaaagcctcaactgacacaggagctcaggcaggccatcacgctgcttggctatcattcggcagaactcgccgagtacattgatgagctctcactggaaaaccctcttattgaacgaaaggaaacagacacaccgccactatcttaccataaaacaaacaaaaacaggatgaatgcacaggaagcgggccttcaattaagtaatccgcaaaaaacattgcaggatgcgttaaaacagcagtcactcgatatgaatctgacaaacactgaaaaaaagatttttaattatctgattcattcgcttgattcaaacgggtacttggaagaagatatagaggaggcagcacggcgattatctgtatcggccaaggaagcggaggctgttttggcaaaactccagtcattagaaccggctggaattggcgcgagatctttgcaggaatgcatccttcttcaattacagcggctgccgaacagaaatgaacaagcggaaatgctggtttcagctcattttgatgcttttgcgcaaaaaaaatggaaagcgctttcagtggaggcaggaattccgcttcatactattcaagatatctcagatgatatcgcggctcttcatcctagacctggccttctgtttgcccggccagagcaagatgtgtatattgagcctgatatttttatcactgtaaaaaacgggcacatcgcagcggaactgaatacccgctcgtttcccgagatcgatctgcatccgcagtacagaacgcttttatcatccggctcctgtcaggatactgtctcctatttatctgcgaaatatcaggagtggcgctggctgagccgcgcgctgaggcagcgaaaacagacaatcacgagaattatcaatgaactgatcacacgccaaaaggatttctttctgaaagggcgaagcgcaatgaagccgctgactctgagagaggtggcggactgtctaagccttcatgaatcaactgtgagccgggccattaaagggaaaacaatacaaacgccttacgggctgtttgagatgaagctctttttctcagcaaaagccgaggcttcaggagagggagatgcgtcgaattatgcagtcaaaatgcatcttgaagacctgatcaatcaagaggacaaaacaaaaccgctttcagatcaaaagcttgtcgatttgctgtatgaacaacacggcatccaaatctcgagacgcaccgtggcaaaatatcgcgatcaaatgaatattccgtcatcggcagcgagaaagcgatataaataaaatcctccctagacgggaggatttttttaaggaatcatccagctgaatatgtgatgctgcaaaaaggtgatgatacaaacgagcagcagcaaaaacagactgtgtttaatggtaaagcggaaaagatctgactcctttccggcgagtcctaccgcggcgcatgccaccgctatcgactgcggtgaaatcatttttcctgtgacaccgcctgaagagttggcggccacagacagaacggggtccatgccgactgataatgcggtgactttctgcaggttgccgaacagcaggttggcggaagtatccgagccggtaatgaagacgccgagccagccgaggacgggcgaaaagaaggtaaacatcgaacctgtcagcgcgagtgtcatcccgagtgtcgtgctcattcccgaggagttggtgacataggcaaaaccaacgacagaagcaatggtcaaaatcggaagcttcaattcttggactgtttctttaaaaacggttccccagtctttccacgaaatcgccgtgatgaactttgacagcactgcggcaatcaatatcgcggtgccggctgaaccaagcacctccagcttgtaaaccgcttcaatcggcgtaccgtcagcattgacaatctgattgttcaaaaaaggcacaccgggggcaaaagtcagtttttctccaacagcattcagccatttcaagaacaccgcagagccttcataatgcccggtcagcgcggatttgacagatggaatgccccatacggatatcattgccgtcagcagcagaaatggcgaccaagccttaaaaatctgtccgccgctgtacgcaggcgctgccggatttgtgcgcgccgtttcaattgaggcggccgactcttgttcaccggcaaaccggaatgttgttttcggcttccaccatttcaaaaacacagcaagcgcagccattgaaacaagagctgacaaaacatcgggcagctcaggccctaaaaaattggaactgagatattgaacaacggcaaaggaaacaccagatacgagaatcgccggccagatctccaaggctttcctgaacccgctcatgatgatgattaaataaagaggaataaatacggataaaaacggcagctgccgcccgaccatttgcgaaatctccatcgccggaatccctgtcggcccttctacggctgtaattggaatcccaatcgccccaaaggcaaccggcgccgtattggcgatcaaacagatccccgcagcataaagaggattaaagccgagaccgaccagcagcgcggcagaaatggcgaccggcgctccgaagcctgctgccccttctaaaaaagccccgaatgaaaaagcgatcaagagagcttgaagccgtcggtcatcagtaattgagagaacagagctgcgaatgatatcaaactgtcccgttttcacagtgattttatacaaaaaaacagacgtcacaatgatccagccgatcggcaacaatccgtatacggctccttgtgtcgcggacatcagcgctttttccgccggcatccgataaaccaatacagcaatgataagggcgatccccaatgtggccaagcctgctgtataccccttcatccgtttaatcgcgagtgcccaaaaaaagaaaataatcggtacaagtgcggcaagcgctgataatagcaaatttccccctataggcgtatatgcctgtgtccattgcatcccaaacccctccttgaaacataaactggcgccatatgtaagcggtttctatagatgatatgatcatctgatgactgggtaataagaccagttacctagcattatattttgaaaaaaatcaaagtacaagactttttgacaaaatagtcaaaatcttttggcggcccacaaaacagagtataatagatcgtaaacagccagacctacaagttacggggtgaattgcattgaaatacaaacagattaaaacaaaaaaaatatatgaagaagtagcggatgccctattagatatgatcaaaaacggcgaattgaagccgggggataaactggactctgttcaggcgcttgctgagagctttcaagtcagccgttcagcggttcgcgaagcactttctgcgctaaaggcgatggggcttgtcgaaatgaaacagggagaaggcacgtacctgaaggaatttgagctcaatcaaatttctcagccgctctcagccgcccttctgatgaaaaaagaggacgtcaagcagctgcttgaggtcagaaaactgcttgaaatcggcgtggcttcactagcggctgaaaaaaggacagaagcagatctcgaaagaattcaggatgcactaaaggaaatgggcagcattgaagcggacggggagctgggagagaaagcagactttgcatttcatcttgcgcttgcggacgcttctcaaaatgaacttcttaaacacttgatgaatcacgtgtcatcattgctgctggaaacaatgagggaaacgaggaaaatctggctgttttccaagaagacctccgttcagcggctgtatgaggagcacgaacggatttacaatgctgtggctgccgggaacggtgtacaggcggaagccgccatgctggcgcatttgacgaatgtggaagatgtgctttcgggatatttcgaggaaaatgtgcaataaccaactcatttcccgggcaattccgccggttccgaatgatacgaacaactgagactgagccgcaaatggttcagtctttttacatggaagccagagggctttgtgcacttgacatttgtgaaaaataaagtaaaatattttactaaaacaatccgagctgaataatggaggcagatacaatggcgacaattaaagatatcgcgcaggaagcgggattttcaatctcaaccgtttcccgcgttttaaataacgatgaaagcctttctgttcctgatgagacacgggagaaaatctatgaagcggcggaaaagctcaattaccgcaaaaaaacagtaaggccgctggtgaaacatattgcgtttttatattggctgacagataaagaagaattagaagatgtctattttaaaacgatgagattagaagtagagaaactggcgaaagcattcaatgtcgatatgaccacttataaaatagcggatggaatcgagagcattcctgaacatacggaagggtttattgccgttggcacattttcagatgaagagctggctttcctcagaaatctcactgaaaatggcgtgttcatcgattcaactcctgatcccgatcattttgattcggtaaggcccgatttggcacaaatgacaaagaagacggtaaacatcctgactgagaaggggcataagagcatcggttttatcggcggcacatacaaaaatccgaataccaatcaggatgaaatggacatccgtgaacaaaccttcagatcctatatgagggaaaaagccatgctggacgagcgctatattttctgtcatcgcggattctctgtagaaaacggctaccgcctgatgttagcagcgatcgacacattaggcgatcagcttccgactgcttttatgattgcagcggacccgattgcagtgggctgtctgcaagccctgaacgaaaaaggaattgccataccaaacagggtaagcattgtgagtatcaacaacatcagcttcgcgaagtatgtctcgcctcctctgacgacgtttcatattgatatacatgaattatgtaaaaatgctgttcaattactgcttgaacaagtgcaggacaagagaagaacggtaaaaacattatatgtgggcgcagaattaatcgtcaggaagagtatgaatgaaggatgacttaggacactaagtcatttttttatttaggtaaaaaaatttactctagaagataaatagtttgtttacacattttctcaggcgtgctatattatctttaaagcgctttcattcctaccgaaagggtgacaatcaatgaaaatggcaaaaaagtgttccgtattcatgctctgcgcagctgtcagtttatccttggcggcttgcggcccaaaggaaagcagcagcgccaaatcgagttcaaaagggtcagagcttgttgtatgggaggataaagaaaagagcatcggcattaaagacgccgttgctgcgtttgaaaaagagcatgatgtgaaggtcaaagtcgttgaaaaaccgtatgccaagcagattgaagatttgcgaatggacggaccggccggcacaggccctgacgtgttaacaatgccaggggaccaaatcggaaccgctgtcacggaaggattactcaaggaattacatgtcaaaaaagacgttcaatcactttatactgacgcttccattcagtctcaaatggtagatcaaaagctttatggactgccaaaagcggtcgaaacgactgtccttttttacaacaaagatctcatctccgaaaaggaattgcccaaaacgctggaagagtggtacgactattccaaaaagactgctaatggcagcaaatttggctttttagccctatttgatcaaatttattatgcagaaagtgtgatgagcggatatggcggatacatttttggaaaggccaaagatgggagctataacccgtcagacattggaattaataatgaaggagctgtcaaaggtgcggcgctgattcagaagttttacaaagatggcctgttcccggctggcattattggagaacaagggattaacgtattggaatcgctgttcacagaaggaaaagccgccgcaattatctctgggccatggaatgtagaagctttttcgaaagcaggaatcaattatggcattacgaaactgccgaagctggaaaatgggaaaaacatgagctcctttatcggcgtcaaaagctacaacgttagtgcattttcaaagaatgaagagctggcgcaagaattagccgtttttctggcaaatgaaaaaaattctaaaacacgatatgaagaaacgaaagaagttcctgctgtgaaatccctagccaatgacccggctattatgaaaagcgaggcggcacgggctgttactgaacaatcccgtttctcagagccaacaccaaatattccggaaatgaatgaaatatggacgccggctgattcagcattacagacggttgcaacagggaaggcagatccgaaacaagcattggatcaagcagctgaaacggccaaaggacaaattaaggcaaagcacagcggaaaataaagagaaagctagatttgtattgtaagagaggtgaaaacggtgcagcatcgtcaagtcgctttgttgctttctatcattccgggactcgggcaattttataacaagcaatggataaaaggtattgtctttcttttcttaggcgcatcgttttttgcggtctttggagatctgctcaatatggggttttggggaatctttacactgggaacagaagtgccgcgggataattccgtttttctgctggcggaagggattattgctgtcatcgtgacctgctttggccttgcggtgtattatgtaaatcttcgcgatgcgttccaaagcggaaaacaacgtgatgaaaataagccattaagttccttaaaggaacaataccagcatatcatttctgagggctatccttatgtcgtcagcggcccatctttgtttattttaattttcgccgtgatctttcctatcttattcagctttgcattagcgtttacaaactatgatttgtatcattctcctcctgcaaaattaattgattgggtcggttttcaaacgttcgcaaatattttcacagttgatatttggaggtcgactttttttgatgtactggcttggacggtggtttggacacttgctgcatccacactgcaagtcacattggggatttttctcgcgatcattgttaaccagaaagaccttcggtttaaacgtttttttcggacgattctgattttgccatgggccgttcccggttttgtgacgattttaatttttgcgggactgtttaatgatagcttcggtgcgatgaatcacgacatcttggctttcttcgggatagatccgcttccgtggatgacagatgccaattggtcgaggcttgcattgattctcatgcagggctggcttggatttccgtacatctttctcgtctcaacaggcgtattgcaatccatcccggacgatctgtatgaagcagctacgattgatggcgcttctgtcttttcaaagttgagatacatcacgcttccaatggtgttcattgcaatggctccgattatcattacccagtttacgtttaattttaataactttaatattatctatctattcaatggtggaggtccggctgtaaccggatcaacagccggcgggacagatatcctcgtttcatggatttataaattgacaatgcagtccagtcaatattctcttgctgcggctttaaccattttattatctgtatttgttatctccatcgcattgtggcaattcagacagacaaagtcttttaaagagggggcataaggtatgctggcagatatgaaagtcagaaaatatatccgtctccttttctcttacttgttgctagcctttatggcggtcatcattgtttatcctctcctttggacggcaggcgcaagctttaatcccggcaacagcttaatcagtacatccatcattccgaagcatccgacattcgatcattacaaggaattatttgcgggcaaggaaagccttcaatatgtgcagtggtatgtcaactctatgaagatcagcctgtttacaatggcagggtctttgctctgtgtgacgtttacggcctatgcgttttcgcgctttcggtttaaagggaggaaatacgctttaacgctctttttattgctccagatgattcctcagttttcagctttaattgccttgtttgtgctggcgcaaatcttgggaatgatcaatagccactggctgctaatcttgctttatatcggcggcctgatcccgatgaatacgtatttgatgaaagggtacatggattccattccgatggatttagacgaaagcgccaagattgacggagccagcagcaccagaatcttcttccagatcattctgccattatcaaaaccgatggcggcagtcgtggccatgaacggctttaccggtccgctcggagattttgtgctgtcctcaaccatattgagaacgcctgaatcatatacattgcccgtcggtctattcaatttagtgaatgatgtcatgggggccagctatacgacatttgcggccggagccctgcttatcagcataccggttgccgttatctttatcatgctgcaaaagaattttgtatccggattaaccgcaggcggaacgaagggctaagagaacaaggaggagaatgtgatgtcaaagcttgaaaaaacgcacgtaacagaagcgaaatttatgctccatgggggagactacaaccccgatcagtggctggatcggcccgatattttagctgacgatatcaaactgatgaagctttctcatacgaatacgttttctgtcggcatttttgcatggagcgcacttgagccggaggagggcgtatatcaatttgaatggctggatgatatttttgagcggattcacagtataggcggccgggtcatattagcaacgccgagcggagcccgtccggcctggctgtcgcaaacctatccggaagttttgcgcgtcaatgcctcccgcgtcaaacagctgcacggcggaaggcacaaccactgcctcacatctaaagtctaccgagaaaaaacacggcacatcaaccgcttattagcagaacgatacggacatcacccggcgctgttaatgtggcacatttcaaacgaatacgggggagattgccactgtgatctatgccagcatgctttccgggagtggctgaaatcgaaatatgacaacagcctcaagacattgaaccatgcgtggtggacccctttttggagccatacgttcaatgactggtcacaaattgaaagcccttcgccgatcggtgaaaatggcttgcatggcctgaatttagattggcgccggttcgtcaccgatcaaacgatttcgttttataaaaatgaaatcattccgctgaaagaattgacgcctgatatccctatcacaacgaattttatggctgatacaccggatttgatcccgtaccagggcctcgactacagcaaatttgcaaagcatgtcgatgtcatcagctgggacgcttatcctgtctggcacaatgactgggaaagcacagctgatttggcgatgaaggtcggctttatcaatgatctgtaccgaagcttgaagcagcagcccttcttattaatggagtgtacgccaagcgcggtcaattggcataacgtcaacaaggcgaagcgcccgggcatgaatctgctgtcgtccatgcaaatgattgcccacggctcggacagcgttctctatttccaataccgcaaatcacgggggtcatcagaaaaattacacggagcggttgtggatcatgacaatagcccgaagaaccgcgtctttgaagaagtggccaaggtaggcgagacattggaacggctgtcggaagttgtcggaacaaagaggccggctcaaaccgcgattttatatgactgggaaaatcattgggcgctcgaggatgctcaggggtttgcgaaggcgacaaaacgttatccgcaaacgcttcagcagcattaccgcacattctgggaacacgatatccctgtcgacgtcatcacgaaagaacaagacttttcaccatataaactgctgatcgtcccgatgctgtatttaatcagcgaggacacgatttcccgtttaaaagcgtttacggctgacggcggcaccttagtcatgacgtatatcagcggggttgtgaatgagcatgacttaacatacacaggcggatggcatccggatcttcaagctatatttggagttgagcctcttgaaacggacaccctgtatccgaaggatcgaaacgctgtcagctaccgcagccaaatatatgaaatgaaggattatgcaaccgtgattgatgtaaagacagcttcagtggaagcggtgtatcaagaagatttttatgcgcgcacgccagcggtcacaagccatgagtaccagcagggcaaggcgtattttatcggcgcgcgtatggaggatcaatttcagcgtgatttctatgagggtctgatcacagacctgtctctttctccagtttttccggttcggcacggaaaaggcgtctccgtacaagcgaggcaggatcaggacaatgattatatttttgtcatgaatttcacggaagaaaaacagctggtcacgtttgatcagagtgtgaaggacataatgacaggagacatattgtcaggcgacctgacgatggaaaagtatgaagtaagaattgtcgtaaacacacattaggctgatgctccgctcgatatgggcggattcttttttctttagaatgaaaacgctcactaagtcttgggaggatgaaatcatgaaaagcaaagtgaaaatgttctttgcggctgccatggtgtggagtgcatgtagttcaacaggatatgccgctgccattgagaaggagaagcacgtgtcaaagcttcgggcagaggatctttttgttaaaaaagtagaggggatgaacaaggattttatcaaaggggcagatgtgtccagcgttattgctttggaaaacagcggtgtcaccttttacaatacaagcggaaaacgtcaggacatctttacaaccttaaaacaggctggggtcaactatgttcgcgtccgcatctggaatcacccgtatgattcaaatggcaacgggtatggcgggggaaacaatgatgttcaaaaagccatcgaaatcggaaaaagagcgacagcgaacggaatgaaggtgctggccgactttcactactctgatttctgggccgatccagcgaaacaaaaggtgcccaaagcctgggcgaatctcagctttgaagcaaaaaaagcaaagctctatgagtatacgaaacaaagcctgcaaaagatgatcaaggaaggctttgacatcggcatggttcaggtcggaaatgaaacaacaggaggatttgccggtgagactgattggacgaagatgtgccaattatttaatgaaggaagccgagcggtcagggagacaaattcaaatattttggtcgccctgcattttaccaatcctgaaacggctggaaggtattcatttattgcagaaacactcagcaaaaacaaagtggattatgatgtgtttgctagctcctattatcctttctggcatggcacattacaaaatttgacctctgtgctgaaggctgttgccaatacgtacggcaaaaaagtcatggtggcggagacatcgtacacctataccgctgaggatggcgatgggcatggaaatacagcaccaaaaagcgggcagacgttgccatatccaatttctgttcaaggccaggcaactgcagtaagagatgtaatggaggcagtggcgaatacgggcaaagcaggacttggtgttttctactgggagccggcgtggattccagtcgggccgaagacacagatagagaaaaacaaagtgttatgggaaacatacgggtcagggtgggcgtccagctatgctgctgaatacgaccctgaagacgccgggaagtggtatgggggaagtgctgtagataatcaagctttatttgattttaatggacacccgctgccttccttgcaggtgtttcaatatgcggagtcaggacatattccaaagaaacgctgaaacaaaaaaatccatgagatgtaacaaatcattgttatgtctcatggatcattttattttacatcaactaatataaaacattcgtcatcactcttatgatgagcttccttttgatgctgcagtgatgtaaggattttctccttcaggtcagcgattggcgaatcaggatgatcctttagtaaatcaaataaataacatgaagccgtaggatccatcacgccatccgtatacagaagcaatcttccgtcctccgtgtatgaaaggctgcttgactgaaactctaagtcttcaaacatcccgatcggaggcgaggtcgcgtgaagcagatgttgagttccgctatcgtcctgccaaagtgccggcggatgccctgcgttgacataatcaattctttgccgtgctatatcaatctcgagataaatggcagtgcaataatgtcttgcttcctcatcattttgaaacaagctgtgaagatgtcggtctaattctttcatgactttgacgggactgagaccttgcgtgatctggcgctggaacaaaggatgaagagacatcgtaatcaatgcagatgaaattccgtgccccatcacatcaaggataataatgccgtaacggtgttcatcgatttgataatatccgtaaagatcacctgacaattcactcgatgcgttgtaataagagtcaatctgaacctgatcgtttacaatcggttcagtcaacgagtttttctggatctttctggcgagttcaagctctcttttggtgtttaatttaaattgttgattttgtttattgatctcaagaagttcttcttgttttgctttaagcgtttccaaggcaatttttaactccgcattggctttctgtttggcaagcaaagcttcctgagcctcatttctggctatcagcagctcattttcatattcatttcgctttcgcattggaatcagaacacaatcaaagacagaagccccgctatcgtgtctcgcaatagcattgataaggacgggaatttcttctccatctcttgctttcagggaaatgtatatttcttcgatgtgatgctccaatttcaaaagcggaaaaaaataaagctggcagaaaagctgtgcgggaatggtcaacatcatattcatgtgctggccgataacctgctccggttcataatccagaatcttgataagggtgcggttggcagctatgatcgacccctcttctgacaaagcgaggaaaccgcatggtgcatcattcaattgtttgtccatctaagagggtcacctctatccctttcgttcctatatcacacgtgtgcttttaaataatcgccgatcagctgtatcgtctcatctggatggctcatatgagggcaatgtccgcgagcctccatttgtttcagactgctataaggcagatgctgatgcatatacttacctactgttgcaggtgcgatgatatcatctgcacattggagaataagagagggaaccgttaccttcgaaagatcctctcggtgatcagaaaaaaacgccgctttcgcgaattggcgggcaatgacaggatcagtagaacaaaaacggctttcaagctcttccttaatttcaggccgatctggctgattcagaacggttgccgcaaatacagtcgcccagccgatataatttttctccatcatctccagcaagccaaggagctgctcctcttcaaatcctccgtaatactcaggcggatcattcaaatagcaaggagaaggccccaccatcaccagatgggaaaaaagctccgggcggcggatggatgcaagcatcccaatcaaggccccgacggagtgacccacaaacacggtttccttcagatctaaagcttcacaaacatcaagaacatcctgggcatagccgtcaagtgtctggtaacgaatcaggtcatatgcgcgcaaatctgaatgtcccgaaccgacgtaatcaaacaaaatcacccgatgatcttcttcaaaggcaggtgccacggcattccacacactttgatcgcatccaaaaccaggtgcgaacatgatagatgctctgccgctgcctttcaccttcacatgatttctagacaaaatcgcttcgttcatgattggctcctttcagccggaaagtaatataaggttcaatagatctatcataacactcggatggtttgaagagtgtatctttctatgaatgtcacagcagtttaaaagaaagaggacatgggagatagaaaagatggatgaattggaagatgcaggaggaggattacctagacaccggggtgagaaagaaaatgacatttgtcacttcatcatcatgacaccccatactaacatcgtcttctccgtcattttacaatcaatgtaaacgatcaggaggtgctcatgtgatgaaagaagtagtaacagtaagcaacgtgacaaaacatttccatcgaaaaaccgctgtaaaccacatcagcttcagtattgaaaaaggagaaattgcagccattctcgggccaaatggggcagggaagacgaccgtcatctctatgatattaggattgctgaaaccgagtgagggagaaatcaaactatttaaccgggttcccgatgatcaacaggttcgtgaaaaaataggtgtaatgcttcaggaagtaagtgtcatgccgggccttaaggtggatgaaatccttgaactcttccggagctattatccgaatccattgtccatgaaagaactcgtttcgttaacagcactcaccaaagaagatttgaaaacaagagcagaaaaattatccggcggacaaaaacgccgtttgagctttgctttggctcttgccgggaacccggaactgcttatacttgatgaaccgacagtcggcatggatacttcatcaagacatcgattctggcagaccattcacggactgtcggaccaaggaaaaacaattattttttcaactcattatttacaagaagcagacgatgccgcacagcgaatcctattttttactgaaggacggcttgttgcagacgactcaccaatgcaaatccgctcaagaattcaaaaacagtctgtttcctttacgcttcattcaagtgaatcattggaaaggctgtcttgtcacccggaagtcgagagagtgatccatgagcatgagagaaccatcatccagacatcaaatacagataaagtgttggcgctgatctttcaagaaaacatcccagcacgagatattcgaattgagcaagcgacgctcgatgaggcatttcgccagctggctgacggcaacagggaggcgatgtgagtgaacatgctgcaaaagcaaagcattgctgaaatgaaaagggtgcttaggaacaagtactttgtgctttggtctctgatcatgccgattgccttttattatttctttacaaatgtagtgaataccaacgtccctgatcaacgtgcatgggaagcccattacctgatgtcgatgacagtcttcagcgtgatgggttcctctatcatgacgcttggcatccgaatggtacaagagcggtcacaaggctggaccgcctttatccgccttacgcctcttccggatcatatctatttatcagctcagatgatcggccaaagtgtcattcacgttttatcgattaccgtcatatttctgttcggcgcaatcatcaatgatattgccttgtcaccgtttgaatggatgatgagcggactgtggattttgtttggcgcattgccttttttagcattaggcacactaatcggcctcatgagaaaagtagaaacagcggccggaatcagtaatgtgctttatatgctgctggctttaggcggagggatgtggatgccgtttgaggtcatgcctgacatgatgcagagcattggccagtggcttccgtcttatcatttcgggagcggagcgtgggaacttgtccggggtgggagtccgacttggaaaaatattctgatattaatcgcttatatgatgctcttcatgctactatctaaatatataagaagaaaacaagaagcggtgtaatgcatgaaaaaggcaatatctattttcccgaaggaattcgggtttttcccttatatctttctggtgtatacgattatgccgttcctctctttattaaaagaatcaggtgtcaaacaggggatcggatatggcatgctgctcctttttgtagcggcatatcgccagttattctgcagcgtgggcaaagcttcgtttacatattggcttatcatgcaaatggccgttattttgatatatagtgtgttttacaatatcacctatatatacttaggttttttcccggcaaactttgttggttattacaaagagaaaacgaattttaaccgtgcgttctgcgctttaatctttatactgctttttccatgcctataccaatttagcgcgaattcggtctcgcttcgggagcttttttctgttctcccgtttctcgtcattatgctcatttctccattcggcattcgttctatgtttcggagaattgagcttgaagctaagcttgcacaagccaacgaacagataaaagaactctctaaaagagaggagcgtgttcgaatcgcccgtgatcttcacgatactcttggccacaccctgtcgctgcttacattaaaaagccagctcattcagcggctggctgcatctgatccagaacggaccaagcttgaggcaaaagaaatggaaaccagttcacgctccgcactcaagcaagttcgagagctggtttctgatatgagaacggtcacgataacagaggagctcgtaaacattcagcacatattaagagcggggaacattacctttcaatacgaaggagccgacgacttttcagcgatatctcccgtcactcaaaatattatcagtatgtgtatgcgggaagccgtgactaacattatcaagcacagcaaagcaacccactgtgccatcaccatttctcagcttgctgacaaaatgaggatcgtgatacgggatgacggaaagggagcgccgaaggagaaaatgtttgggaatggcctgcggggaatggaagaacggctcatactcattgaagggggattaacggtttcagatcataacggaacggttgtggcactgacgattccgcttattaaaaaagcagaatgattggaggacgaaaagaatgattcgtctgtttattgctgaggaccagcgaatgcttttaggcgctttgggatctttgcttgatttagaagaggatatgacagtcatcggacaagcattaaacggggaagaggcgctacatgctattttgaagctggagccggatgtatgcattatggacattgaaatgccggttcgaagcgggctggatgtggcagaggaattaatgaaaaaaggctgcgtcagcaaggtcattattttaaccacctttgcccgccccggatattttgaacgcgccgtaaaggccggtgcacatggctatctgctgaaagacggcgaaattgacgatctggccgatgccattcgaaaatgtgtaaagggaaaacgtgtcttcagccccgagctgacgtttaatatgatgcgagacgaaaatccgctaaccgttagagagcaagaaattctgaggcttgcggctttaggcaagacaacaaaagacattacgctggagctctatttatctcaaggcacagttcgaaactatatctcagaaatcatccaaaagcttaatgcgaaaaatcggacagaagccgccagcatcgctgaggaaaaaggctggatttaatggaaacctggttatttatagccgggtttttttgtgtttagctggtcatttatggttgtaatattcagtataactgtatatgatgggattatacagttatactgaatattggaggctgttatatgaatgacaataagcatttgccgctgactgagactgtttactatgttcttttatctttgttacatcctgctcacggctacatcattatgaaaaatattgaagatcttagcggcggaagagttaaaatggcgcctggaactctttatggcgcaattgaaaacttattgaagcatcaattgatagagccttatccaagtgaagatcgccgcagaaaaacatatattatcactgaactgggaagaaatgtgttgtggaaggatatggagagaatggagcggctggttgacataacgaggcaggaagtaaataaaaagggggagaccatatgaagaaatacagatattttatggacatagacagtgaggaacaatggctgaataagatggcagataaggggtgcgaattaaaagggaaagtttttttatcctattgtttttcagatgaaacatcgtctgacaattctaccgtcaaaatagactatcgcacctttaaacatccgggagattttactgattatcgaactctctttgaagacagcggatggaagcatcttttcagttcacaaggcctgcattattttagaaaagagaaagccagtgcatcagacgatattttttcggatacagaatccagagccggaagatataaacgcctattgcaatcgtactttgcactttcttttatattcttatccttcatcatgatcctctttactactaatggtttgactgctgatttatttatccgtccccagagtttgtattatacgccgggcctgtgggataagacgggagcagcttttatcagagcctttttgtttgaaacaccttttgcactgatgagaggggtagcgggctggattgttctccttagcgctcttagcttcttttattcatttgtaaagacatttaaaaaatacagaaagtgcctgtatggccattaaaaagtgtgtagtgctatgaacgtctgtccagtggaacaggcgttttttattgccgagatgtttagaaaaccctttccttccattgtcagaatagtgtacgatattcatatagttattttaactcaggtcatcagatgacctgatcatatattggggatgagagaggggttcatcatgaaagtctcactttttgtcacttgtcttgttgatatgtttcaaacaaatgtcggaaaagcaacggttgagctgctggagcggcttgggtgcgaggttgattttccggaagggcagatttgctgcgggcagccggcttacaacagcggctatgtacatgacgccaaaaaagcaatgaaacggatgatcgaaacgtttcaggattccgaatatgttgtcagtccttccggttcctgcacaacgatgttccgggagtatccgcacctgtttcaggatgatccgaaatgggccgataaagcgcaaaagctggcggataaaacgtatgaactgacagattttattgtgaacgtccttggggtagaggatgtcggcgcgacccttcatacaaaagcgaccttacatacgtcgtgccatatgactaggctgctgggtgttcgggaggagccaatgaagctgttgagccatgtgaagggcctgcagtttacagagcttccgggcaaacataactgctgcggattcggaggaacgttctcagtcaagatggcgcagatttctgagcagatggtcgatgaaaaagtcgaatgtgtggaggaaacgggagcagaggtgctgatcggtgctgactgcggctgtttgatgaatatcgggggacggcttggccgaaaagataagaatgtcaaagtgatgcacatcgccgaagtgctcaacagcagataaaactggatacagagggggaaaggatcatggcgatgaaaatcggtactgacgcttttaaagagcgggtatcacaggggattgataatgaatttatgagaggcgctgtttcaggtgcacaggagcgtctgcggacgcggcgcctagaggcagcagaagaactgggaaactgggaggagtggcgctcattatcagaggaaatcaggcagcatgtccttgaaaaccttgatttctatctaggacagcttgccgaaaatgtggcgaaaagaggcggacatgtctatttcgcggaaacagcggaagaggcgtcttcttatattcgtgatgtcattcaaaagaagaacgggaagaaaattgtgaaatctaaatcaatggtcacagaggaaatcaatctgaatgaggtgctggagaaggaaggctgtgaagtcgtagaaaccgatctcggcgagtatattttgcagattgatgatcacgatccgccgtcacatatcgtagcgcctgcccttcataaaaataaagagcagatacgcgatgtgtttaaagaaagactggactatcaacatacagaaaaaccggaagagctggtgatgcatgcgcgcgccattctccggaaaaagtttctggaagcggatatcggcattaccggctgtaacttcgccatcgctgacacgggttccgtcagccttgtgaccaatgaaggaaatggacggcttgtgagcaccttgccgaaaacacaaattaccgtcatgggaatggagcggattgtcccgtcattttctgaatttgaagttctagtcagcatgctgacaagaagtgctgtcggacagcggctgacaagttatattacagctttgacgggtccgaagctggaaggtgaagtggacggtccggaagaattccatcttgtcatcgttgacaatggacgatccaatatccttggaacggaattccagtctgtgctgcaatgtatccgctgtgccgcctgtatcaatgtctgtcctgtgtaccgccatgtcggcggacattcatacggctcaatctactcgggaccgatcggagcggttttatcgccgttgctcggcggttatgacgattataaggagctgccgtacgcgtcttcactgtgcgctgcttgttcagaagcctgcccggtcaaaatcccgcttcatgagctgctactcaagcatcgtcagaatatcgtcgaaaaagaaggcagagcgccgatcagtgaaaagcttgcaatgaaagcattcggacttggcgcatcctctttatcgctttacaaaatgggctcaaaatgggcgccggccgccatgacgccttttacagaggacgaaaaaatttcgaaagggcccggcccgcttaaaaattggacacagatccgtgacttcccggcaccgcataaatcgagattcagagactggtttgcggacagagaaacaagtgaacgcacgaaggaggagcagtgatgacgaagggaaccattcagaatcaagagagctttttaaatcgaatcgcatccagcctgggccgtgaaagaagaacaggaggcgtggcagtccctgaatgggcgcatcagccgcaatataaaacacttgaaggttattcagcggatgacttagtcacagtgctcaaaaaccattgtgtcaaaatccatacagagctgattgaaacggattcaaccggcctttatgatgccctgcgcgagcaagtcagccgcttttccggaggccctgtcatcattccgaaggacccccgctttgaagaatacggactgaaaagcctgctcaccaaggactggccgagtgaaggaacacctgtctgggagtgggatgctgacaaaggcgaggaaaatatcaaaaaagcggagcaagccaatgtagggattacattcagcgaaattacattggctgagtcggggacggttgtcctcttctcctcaaaagacatcggccgatctgtcagccttctgccgacgacttatattgcgatcgtgccgaaatcaagcattgtaccgagaatgacacaagccagtgatatcatccgccaaaacattgcgaacggtgacactgttccttcatgtatcaactacattaccggaccgagcaactcagcagacattgaaatggatttagttgtgggagtgcacggacctgtaaaggcagcatatattctcgtctctgaccgctgaactcaggaagcccggcaggcatatgccgggctttttgcttgaaaaaacttcaacttccaattttttggccgatgagaagagtatgacttgatacaggaggaaatgcgatgaaaaaatggctgatcatagcggtttcactggcgattgcgattgttctgtttatgtatacaaaaggagaagcgaaggcagccggaatgacactaggctacacgactggggatacggcttcatacaattctcttacgaaatatcatacatacatgaatgccatcgcaaccgatacatttgcgtttgaaaaaaacggacgaatcattggcgatgccccaagcaagcagctgacatatgcgaaaaagaaaaaaatcaagacatgggctgtcatttcaaactataatgatgccatttatgattttgacggagatttagcgagtcgggtcatgagcaataaaacagcgaaaaaacgattcacagatcagttaataacactggccaaaaagcactcatattacggaatcaatatcgattttgaagcagtaaatccagaagaccgcgctgcgtactcgaccttcattcaatatgtctcacaggctttgaacaagaaacatattaaaacaatggtatccgttccggccaaaagcgccgatgataaaaatgatgactggagctggccgtatgattatgcgaaaatcggcaaatatgccgacttcgtacaagtcatgacctacgacgaacatggcatttggggtgagccagggtcagtggcaagcacaaactggatcaaaagctctctgcagttttcagtcaaaaagatcaaagccaataaagtcatcatgggaatccctgcgtacggctatgactgggatgtaaaagacggaagtaccagcacaataagggaatggaatgagctcaaatccctcatccaaaaacaaaaagcaaagccggcattcaacaaaaaatcaggttcgatgacgttttcttatgttgacaaaaagaagcataaacatgtcgtgtggtatgaaaacgaaaaaaccgttcaaacgaaaagccatctggcaaagcaatataaaatagcaggtgtttcagtttacgcattaggaaacgagtcagaatccttttggaaagccattcgaaaagggacaaaataacagtttcttttttctctgaagttattgacagttaaaagagaagcacgtatattatgttaatatattcagatcataaaatttgagtttttcagaaaactaaaacacatagattgggagcagtaaaagaaagtgatcagaacagagagctgcggggtggtgcgacgcagcctgattcttctttgaactcgcccgggagtggtaagacggaacggaatagattgaatattccctatgttttaacggctaaccttcgttacaggtcaaaagcaggattcttcatgaagaatcaacaagagtggtaccgcggtcagccgaaggctcgtcgtctctttatctattagattaggtaggagacggcgggcttttttgtttttgaaaacgagaaggagaggtagaagaggatgaaaaacgacaatcaaacgttaaaacgcacgatgacgtcccgccatattatgatgatggcgctgggcggagcaatcggcgcaggtttatttaaggggagcagctcagcgatcgatgtggcagggccatctgtcattatcgcatatctgctcggcgggattattttgctgtttattatgcaggggctggcggaaatggctgttcgaaatcgtaacgccagaaccttccgtgatcttgtccagcaggtattgggaaattacgccgcttactttttggactggatctactggaaaatgtgggtgcttaacattgcggctgaagctgttgtagctgcgattttcattcaatattggctgccgggctgcccgatctgggtgttggcattaggaatttctcttatcgtcacgattgtaaacttgctttctgttaaaatcttcgccgaaaccgaatattggctggcaatgatcaagattaccgttattattatctttattattctgggattgctgctcttatttgtatcattcggtgatcatacagcatccggattttcaaatctgacagaccacggcggatttttcccgcacggcggcacagggctgatcacggcgatgcttgtcgtcatctactcttacggcggtacagaaattatcggtgtaacgcttgcagagacaaaaaatccggaaaaggttgtcccgaaagctgtccgcagcacactgacacggattgtcgcgttttacctgctgccgtttttcatcatcgtcagcttgattccatggaaccaagtcaattccgttccggaaagtcctttcgtgatggtctttaaaatggtaggcattccgggcgcggatcatatcatgaatgcagtcatcctgctggcgatcatttcttctatgaattcaggtttatacggatcatcacgcattttgtatacacaggcaagtgacggaaggcttccaaaggtcttctcgaagctttcatcgaaaaacgtaccgatgtttgcgattctgatgtgcacttcttctctctatattggcgtattgatttctctgttcgcaggaagccaaacatttaattatttaatgggatcattgggatataccgttttattcatttggctgatcatcggattcgctcatttaaaatcgagaaaacagcaaacggaaacaccggcctattatgtaaaatggttcccgtacacgacatggtttgcgattgtggcattactcgccattctgatcggggtcatcatgacaacatcaattgtcattactggcattactgcggcgatctaccttttgattacagttgcatatttggtcaaaggacgcaagcatcagtaaataagaaaccctcttgccgcatccggcaagagggtttttattattgtgcagctttctcgtttataccaatcgccgcagctttctgcgcttttgattttgtattcacgagacagatgctcgtgacaatcagcagcagccctgccaagaggctaagggtgagcggttcatgcaggaaaatggagctggccacgattgatatgagcggaatcaaaaaagtataagatgcgaccttgcttgcttcgcctgaaccgacaagcgtaaaaaagacaagccagccgagcgcgataacgaatacggagatgaacagcaggctcgtgataaacggagctgtccattggatcgccgaaaagctttctgtccaaaagccggatataagcagaaacacgcttccgatcgtcagctgcagagcgaccatccagatggaatcgacgcggctgcctgtttttttcatatataccgtcccgagcgcccagctgactgcggagccgagagccagcagaaccccaatgacagaaatatgcccgccaaagcccgcagcactaatgacggctactcccgcaaaaccgaggatgaggccgatcactttcattacaaacatggattcgccgagccacagccaagaaaatacacccatcagaacaggctggaagaagacgattgcagaaaacaggccggccggaagataattcagcccgatcgtttgcaggccgtagaataacgtaatatttaaaagagcagaaacaagataaatcggccacgtttcttttaagcgtaatttatgaatacgcggcagtgcgacaatgactaataaaagcccgccgatcagtgttcggatgcccgcgaacaataatggcggagaataggcgagcgcggctttggacagcggccaattgacgccccacatgatgacgagaaatgcgagcaggagagctgtccgcgtttttgagagctgcttcattgttcattcactccttgtagaacttttccatcatatgatacggtagaacataagataaataaaatgaatcttttttataaggagcataagtaaattgttatgaccattacacaatttaaggtttttgtgaaaatagctgaaacgggaagctttacaaaagcgggtcaggcgctgaacatgacacagccggctgtcagccatgcgatttctgcgatcgaagctgagcttgatgtaaagctgatcattcgtgaccgccgcaatggcctgatgctgacagatacgggaaaacagatcttagtacacatcagagaagtcttaaaaggcattgaaaaagttgagcaggtagcagcagcggaaaaagggcttgaactgggaacgatccatatcggcacattctcaactgcctcggcttattttatgccgaagctgatcagtgaatttaaacaaaaatatccaaaacttgagctcgtgctgcaagagggaactgtaaatgaagtcaaggagtggcttcatacccggatgatagatgtcggcattcttctgtatccaacagaggagatggagtacatccatttgaaaaaagacaaaatggctgtcgtgctcagggacgatcacccgcttgccagtcattcggccattacgctgaaagatcttgaccatgaaccgatgatcgtctgtgacggaggctatgaatcaccatttgtcgatatgttcaggcaggcgggcgctacgctgcacccagctttcacggtctataacatcaacacctcgatcagtatgatcagagaaggcctgggtctcgcgattttatcagaaatgtccatgtcggggatgccgcttccggagcatgtggtgacccgggaattggacccgcaggtataccgtgatgtgcagcttgctgttccgtcgctaaaggaggcttctctggcggctaagctctttattgagatggctaaggagctgtttggagcagaatagcgggccaaaccgttcgttttacattgttcgaatttcatcgaatcaaattcttttattcctgaatgcagttgtgttatggtgtgatagaagttctttcaatcatgacctgacagctttgggctgtttactgataacacatttgcaaaggagaacaatatgtctaacaaccaacgcaaagataccttgctttctgtcttgaatttatctccggttgttcagggaggaacgattgcagaatcattccgaaacagcatggacttggcgcgccgggcagaggaatggggctatcaccgttactggcttgctgaacatcataatatagaaggtgttgcaagctccgccactgcagttttgattggccatattgccggaggcacgaagaaaatccgcgtcggttccggcggcattatgctcccgaatcactcttcattagtcattgctgaacaattcggcacactggaaacactgtatcccgggcggattgatctggggcttggacgtgcgccgggaacagaccaattgacagccagagcgctccgcagaaatatcaacagcggggaggattttccagaacaattagaggaactgcgcaattattttaaaccgtcaggaaatgtgcgcaatcaagttcgcgccattcccggagagggcatagatgtgccgatttggctgctgggctcaagcggcttcagcgcccgtctggctggtgaactaggtcttccgtttgcctttgccgctcatttctcaccggcgaatacggttcctgcattggagctttaccgcaattctttcacgccgtcagacgtgctcgacgaaccgtatgcgatggtcggtgtcaccattatcgcggcagatacaaacgagaaagcgcagcaccttgcgacttcgcattatcaaaggtttcttgatcttgtccgcggtacgccgaaccagcttaaaccgcctgttgaggatatggatcaaatctggagcccgtatgaaaaagcgatggtcaatgaacagctgagctccacgattgtcggaggtccggaagaagtgaaggcgaagcttgaagatttcgtcaaaacgacacaggctgacgaaattatggttaactcagaaacctttgaacacgcagacagaatgcgttcgtttgaaatcatcgctgacgtttggaaaaacagataacagctataaaaaaagcaatgtagcggggagacccatacattgctttttttattcattcagttttcgtgcggactggcgaatgatcaactcaggctcaaatatgacatcctcttgcttcggctttttatgctctaagcagtcaatgacatatttggcggctgcttttccaagcactgatttcggatgtttgacagaggttagtttcacttctgagatttgggcgaaatgtgaatcatcatacccgacgatagacatatcttccggcactttaagatccatctccctcagcatatcaatcaccttcagcgcaatttcatcgttataacaaagaatggctgtcggcatgtgcttgctgtttttctccagtgtggcttttactttctccagaagttttgattctttttcttccgttgtaaatgtcacgatcatatccggagaaggaaacaactcacgctcccggtgcgcctgtataaatccgttcatccgtttcacgccttgtgtgtcatcagctttaaaaatacccatcatatgcgtgtggccgagagaaagcaaatgctccgccgccatcatcccgcctttcacatcatccaaggtaaaacttggcgcggcaagctcggcatatgacgcgttaatcatcgcaaaaggaatgccgtttttctccaagttcagataatagccgatgtttggggtttgaagggcgctttttgtcggttctacgatgagtccgtcaatatgctgggacagcaggttttctaagcctcttctttcattgtccgggttgttgtttgtgcttgtcaaaagcatagaatacccctgctcgcttaaataggactcgattcctctgatgatgctcgggaaaatatagtctgatatgtaagttgtcaaaacaccgatcgttttattggaatgcagcgctgacttagcagagcgtgaagcgacaaaggtgcctccgccttgcacgctgtacagcagaccttgtgatacgaggtctccgatcgctttgcggatggtatgccggctgacgccgaattgctgcattaattcgttttcggtagggattttttgatcgggcagtattttgccttgattaatccatgaactgatttcttcttttacttgcgcgtattttggtaacatatccattcctccaaaatgtatacggacaaatttcagtatatcacagcgttctttgtaagaaaacattgacagaaaatgcaaacaagattattctatatttgtacgtactaattaaatgtaattttcgttaaattttaatataagtacgtacaattgaaaaacataatgtaaacgctttactcaacattcgggagggcagggaaatgaagaatactccaactcaattagaaccaaatgttcctgtaacacgaagccattctatgggatttgtcattttgatctcatgtgcggcggggcttggcggcttattgtatggctatgacacggcagtgatttctggcgccatcggttttctgaaagatttatacagcctgagtccgtttatggagggacttgtcatttcaagcattatgattggaggagttgttggcgtcgggatatccggatttttaagtgacagattcggccggagaaaaattttaatgacagccgctttgttatttgcgatatcagcaatcgtttcagcgctttctcaagacgtgtccaccttaatcattgcaaggattatcggggggctgggaatcgggatgggctcatcgctctctattacgtatattacagaagcggcaccgccagccatacgcggaagtttatcttccttatatcagctctttacgatactgggtatttccgcaacatactttattaatctagctgtgcagcggtccggaacatacgaatggggcgtgcacaccggctggagatggatgcttgcttatggaatggtgccgtccgtcatctttttccttgtccttctcgtcgttccggaaagtccgagatggctggcgaaagcgggcaaaacaaatgaagctttaaagatcctgacacgtattaatggagaaactgttgcaaaagaagaattaaagaacattgagaactcattaaaaatagaacaaatggggtcgctctcccagctgtttaagccgggtctcagaaaggcgcttgtcattggaatcctgctggcgctgtttaaccaagtcatcggcatgaacgcgattacttactatggtccggaaatctttaaaatgatgggattcgggcaaaacgctggatttgtgacgacttgtatcgtcggggttgtagaagtcatctttaccgttattgcggtgttgctgattgataaagtcggacgaaaaaaactgatgtccatcggttctgcttttatggctatttttatgattttaatcgggacgtcgttttattttgagttaacaagcgggatcatgatgatcgtccttatattaggttttgtcgctgctttctgtgtctcggtcggaccgatcacatggattatgatttctgaaatcttcccgaaccatctgcgtgcgcgggccgcgggcattgcgaccatctttttatggggagcaaactgggcgatcggacagtttgtgccaatgatgatcgattctttcgggctcgcctatacattttggatctttgcggtgattaacatcctttgtttcctgtttgtcgttacgatctgtccggaaacgaagaacaaatcgctcgaggaaattgaaaagctttggataaaatgaaaacgctttaatgaaacagccctttctacgggaagggctgtttatattgggatgcaccatttggcgctttctgtataagataaagatatataggataaaatattgctggataaaacgacgcggcatgaaaactctgcgaatattgtcgatgaattggctcttaacagttgaataaacaattccaccctgttaaaataattaaagaaagcagaaatgattttttttggctatgacgggacgttttttgtcatagcgggacatataatgtccagcaaaaaaggaaggaacgtttgagtcatgaaccagttaatacaagctcaaaaaaaattattgcctgatcttctgctcgttatgcaaaagaggtttgaaatcttgcagtatatcaggctgacagaacccatcgggcgaagaagcctgtctgccagtctcgaaatcagcgagcgtgtgctgaggggcgaggttcagtttttaaaggaacagaacctggtcgatattaagacaaacggcatgacattgacagaagagggctatgaactgctttctgttttggaagatacgatgaaagatgttttaggtttgactcttttggaaaagacattaaaagaacgtttaaatctaaaggatgccattatcgtatccggagacagcgatcaatccccatgggtcaaaaaagaaatgggaagagcggctgtcgcatgtatgaaaaaaagattttcaggcaaaaatatcgtcgctgtaactggcggtacgacaattgaagctgtcgccgaaatgatgacgccggattctaaaaaccgcgagcttttgtttgtgcctgcaagaggcggtttaggcgaagatgtgaaaaaccaggcgaacaccatatgcgcgcatatggcggagaaggcttcaggcacttaccggcttttgtttgttccgggacagctgtcacaaggcgcctattcatctattattgaagagccttctgtcaaagaggtgctgaacaccattaaatcagcgagtatgctggttcatggaatcggcgaagctaaaactatggctcagcgcagaaacacgcctttagaagacttaaagaaaatagatgataacgacgcggtgacagaagcgttcggctactattttaacgcggacggcgaagtggttcacaaagtgcattctgtcggaatgcagctggatgacatagatgccatccccgatattattgcggtagcgggcggatcatcaaaagccgaggcgatcgaggcttattttaaaaagccacgcaacacggttctcgtcacagacgaaggagccgcaaagaagttattaagggatgaataatccctcaatataaatatctctcacttatttaaaggaggaaacaatcatggcagtaaaagtcggtattaacggttttggtcgtattggacgtaacgtattccgcgcagcattaaacaatcctgaagttgaggtagtagcggttaacgatttaacagatgctaacatgctggctcaccttttacaatatgattctgtacacggaaaattagacgctgaagtttcagttgacggtaacaaccttgttgttaacggcaaaacaattgaagtttctgcagaacgcgatcctgctaaacttagctggggcaaacaaggcgttgaaatcgtagttgaatctactggtttcttcacaaaacgcgcagacgctgcgaaacacttagaagctggcgcgaaaaaagtaatcatctctgctcctgctaacgaagaagatatcacaatcgttatgggtgttaacgaagataaatacgatgcggctaaccacgatgttatctctaacgcatcttgcacaacaaactgccttgcgccgtttgcaaaagtacttaacgataaattcggcatcaaacgcggtatgatgacaactgttcactcttacacaaacgatcagcaaatccttgatcttccgcacaaagactaccgtcgtgcgcgtgcagcagctgaaaacatcatcccaacatcaactggtgctgctaaagcagtttctctagttcttcctgaactaaaaggcaaactgaacggtggagcaatgcgtgttccaactccaaacgtttctctagttgacttggttgctgaactgaaccaagaagtaacagctgaagaagtaaacgcagctcttaaagaagcggctgaaggcgaccttaaaggaatccttggctacagcgaagagccattagtttctggcgactacaacggaaacaaaaactcttctacaatcgatgctctttctacaatggttatggaaggcagcatggtaaaagtaatctcttggtacgataacgaaagcggctactctaaccgcgttgttgaccttgcagcttacatcgcaaaaaaaggtctttaatttatagctgaaaaaggacctgacttggttctttcgaatagaagcgctataatgaaagcggacaagggaaggggacggactccctttccctttttccatgaagaccggctttcagaaaacgctctgtgatagagaaacgaccgcgttttaagcagccttgccggcgctttcgcctaaggccgctgccctggcttttagacgaactgccctgtgccgaaaaagactgcgatctgccctagcggcgttatcgcttgaacagacggtttcacgtttttcgtgctgtatgcaaaccattttgaaggaggatctcctaggcatgaataagaaaactctcaaagacatcgacgtaaaaggcaaagttgtattctgccgcgttgactttaacgttccaatgaaagacggggaagtaacagacgatacacgtatccgtgctgcgcttccaacaatcaaacaccttgcagaccaaggcgcaaaagtccttcttgcgagccacttaggccgcccgaaaggcgaagtggttgaggagcttcgtttaactcctgtcgctgcacgtctcggcgaactgcttggcaaagaagtgaaaaaagcggatgaagcatacggcgatgctgtaaaagcacaaatttccgagatgaaggacggagacgttcttgtattggaaaacgtacgtttctatcctggtgaagagaaaaatgaccctgagcttgcaaaagcatttgctgagcttgcagatgtatatgtaaatgacgcattcggtgctgcccaccgtgctcacgcatctacagctggaattgccgagcatctgccagcagttgcaggtttcttaatggaaaaagagcttgatgtacttggaaaagcggtttccaatcctgaccgcccgttcacagcgatcatcggcggagcgaaagtaaaagacaaaatcggtgtaatcgaaagtcttcttggtaaagtagacaacctgatcatcggcggaggtcttgcttatactttcgtaaaagcgcttggctatgaagtcggtaaatctcttcttgaagaggataaaatcgagcttgcgaaatcatttatggaccgcgctaaagaaaaaggcgttaacttctacatgcctgaagatgtactcgttgcagatgatttctctaacgatgcaaacgtgaaaattgtgccgatctctgaaatccctagtgatttagaagcaatcgacattggtacgaaaacacgcgaaacgtatgctgacgtcatcaaaaacagcaaacttgtcgtgtggaacggaccaatgggtgtattcgaaatcgacttgttcgctcaaggaacaaaagcggttgcggaagcattggcagaggcgaaagatacatactctgtcatcggcggaggagactctgcggcagcggttgaaaaattcggccttgctgacaaaatgagccacatctcaacaggcggcggcgcatcccttgagtttatggaaggcaaagagcttccaggggtagctgcactgaacgataaataatctcaaaactgctataaggaagtggaacagatgagaaaaccaattatcgccggtaactggaaaatgaacaaaacactcggcgaagctgtcagcttcgttgaagaagtgaaatcttccattccagcagcagacaaagctgaagctgttgtttgcgcgccagcgcttttcttagaaaagcttgcttctgctgttaaaggcactgacctaaaagtcggcgctcaaaacatgcacttcgaagaaagcggcgcgttcacaggcgaaatcagcccggttgctctgaaagaccttggcgttgactactgcgtcatcggccactctgagcgccgtgaaatgttcgctgaaactgatgaaacagttaacaaaaaagcacacgcagctttcaaacacggcattgtgccgatcatctgtgtaggtgaaacgcttgaagagcgtgaagccggcaaaacaaatgatcttgttgctgaccaagtgaaaaaaggccttgctggtctttctgaagaacaagttgctgcttctgttattgcgtatgagccaatctgggcaatcggaacaggcaaatcttctacagcgaaagatgcgaatgacgtgtgtgcgcatatccgtaaaaccgtcgctgaaagcttcagccaagaagctgcagacaagcttcgcatccaatatggcggaagcgtaaagcctgcaaacattaaagaatatatggcagagtccgatattgacggtgctttggtcggcggcgcgagccttgagccacagtcattcgttcaattattggaggaaggtcaatatgagtaaaaaaccagctgcactcatcattcttgatgggttcggattacgtaacgaaacagtagggaacgcagtcgctttagcgaaaaaaccgaattttgaccgctattggaaccagtatcctcatcaaacattgactgcttcaggcgaggctgtaggtcttcctgaagggcaaatggggaactccgaagtaggtcacttaaatatcggtgcgggacgtattgtgtaccaaagcttaacacgcgtaaatgttgccattcgtgaaggagagttcgaacgcaatcaaacattccttgacgcgatcagcaacgcgaaagaaaacaacaaagccttgcacctgttcggtcttttatctgacggaggcgtgcacagccatatcaaccatttattcgcactgttaaagcttgcgaaaaaagaagggctgacaaaggtttatatccatggcttccttgacggccgagatgtaggtccgcagacagcgaaaacgtacatcaaccagttgaacgatcaaatcaaggaaatcggtgtgggtgaaatcgccagcatttccggacgttactactctatggaccgcgacaaacgctgggaccgtgtagaaaaagcgtaccgcgcaatggcgtacggcgaaggcccatcttaccgcagcgccctggatgttgttgatgattcatatgcaaatggtatctacgatgaattcgtgattccatctgtcatcacaaaagaaaacggtgagcctgttgcgaaaatccaagacggcgattctgtgattttctataatttcagaccggaccgcgctatccagatttccaacacgttcacaaacaaagacttccgtgacttcgaccgcggcgagaattatccaaagaacctgtatttcgtctgcctgactcacttcagtgaaacagttgacggctatgtagcgtttaaaccgataaatcttgataacacagtcggagaagtattatctcagcacgggttaaaacagcttcgaattgcagaaactgaaaagtatccgcacgtcacgttctttatgagcggcggccgtgaagctgaattcccgggtgaagagcgtattctcatcaactcgcctaaagttgcaacgtatgacttgaagcctgaaatgagtgcgtatgaagtgaaagacgcgcttgtcaaagaaattgaagctgacaagcatgacgcgatcattcttaacttcgcaaaccctgatatggtcggccactccggaatggttgaaccaacaattaaagcaattgaagcagtggacgaatgcttgggcgaagtcgttgacgcgattcttgctaaaggcggacatgccatcattaccgctgatcacggtaatgctgacattctgattacagaatcaggcgaaccgcacactgcgcatacaacaaacccagtccctgtgattgtaacgaaagaaggcattacgctgcgtgaaggcggaatcctaggcgaccttgcaccaacgttattagaccttcttggtgttgaaaaaccgaaagaaatgacaggaacatctttaattcaaaaataatttgaaaatcaaaaggagagacaaaactcatgccatacattgttgatgtttatgcacgcgaagtattagactcccgcggcaacccaacagttgaagttgaagtatatacagaaacaggagctttcggccgcgcattagtgccaagcggagcttctacaggtgaatacgaagcggttgagcttcgtgacggcgacaaagaccgttaccttggaaaaggcgtgttaacagctgttaacaacgtaaacgaaatcattgctccagagcttcttggctttgatgtaactgaacaaaacgcaatcgatcagcttttaatcgagcttgacggtactgaaaacaaaggcaaacttggtgcgaacgcaatccttggcgtatctatggcttgtgcgcgtgctgctgctgatttcttacagattcctctttaccaataccttggaggattcaactcaaaaacgcttcctgtaccgatgatgaacatcgtaaatggcggagagcatgctgataacaacgtggatattcaagaattcatgatcatgcctgtaggtgctcctaacttccgtgaagcacttcgcatgggcgctcaaatcttccacagcctgaaatcagtattaagcgcaaaaggcttaaacactgctgtaggtgacgaaggcggattcgctccaaaccttggttctaacgaagaagcacttcaaacaatcgttgaagcaatcgaaaaagccggcttcaaacctggcgaagaagttaaacttgctatggatgctgcatcttctgagttctacaacaaagaagacggcaaataccatctgtctggcgaaggcgttgtgaaaacatctgctgaaatggttgactggtatgaagagcttgtttctaaatacccaatcatctctatcgaagacggacttgatgaaaacgactgggaaggccacaagcttcttactgagcgtcttggcaaaaaagttcagcttgttggtgacgacctcttcgttacaaacacgaaaaaactttctgaaggtattaaaaacggcgtaggcaactctatcctgatcaaagtaaaccaaatcggtacattgactgaaacattcgatgcgatcgaaatggcgaaacgcgcaggctacacagctgttatctctcaccgttctggtgaaactgaagacagcacaatcgctgacatcgctgtggcaacaaacgcaggacaaatcaaaacaggtgctccgtctcgtacggaccgtgttgcgaaatacaaccagcttcttcgcatcgaagatcagttggctgaaactgctcaataccacggtatcaactctttctacaacttaaacaagtaataacaagtaataaaaagaccgccgggattttctcggcggcttttttatgctttcagagatccaaataaagcctcaccatatcgcggcattgaatcccgttttcaaaaatgtcctcatcataatgtctgagaaagaaatcgtggtcgatcgcctgaatgcggaatccgcatttttgatagagggaaagctgatgaatgctggaattccccgtgccgatttcaatcgtgtccgcccctagctccttcgctttttcgatggcgtcaagtacaagctgtttgccaaagcccttcttctgaagagattcttttaccgcaatatttacaatttcaactgtttgcggccttgtttttagcaatacataaacacctgcaagctcatcaccggcccaagctgtgtaacattctcccctctcaagatattcatctacaatgtctttcgatggatcggcgagcagcaatagatcatatagttcgtcatttgtttcttctcctaattcaatcctgagcttttgcatattcattccacctttttagtctgatagacatttaattttttcattcgttcccaatttcattctgttttattataaaatatgaaaagcagtaaatgttatcaaattagtagaataggaggaaagtcatgtttttttgtaagaattgcggctcccagaataatgaaggagccaagttttgtaaacaatgcggcaccccgatcggagggggcagcaaacaggcaaatcaagaaacagctagcactgcagaaacaaggcaggctccgcgaaaaccgatccctaagaaaaacatcattttatggagcagcattgccgcggcgtgcgttatattattcgccgcatataaaaccggagcgtattttacttcaaaggataggttagtcgacaagtttgaacaggccgtaaatgatggggatcaggaccaaatcgcgactctgcttacaccggtaaatgacaatcttaaactcactaaaaataatgtaaaaccgtttcttacatatttgaaggatcatccagacaaaaaagatgaactttttgcatcgctccgtgaggaaacagcccagaaggatatcgtatacgcagaaaaagacggaaaaagcctgctggtatttgaccattacgacttaaaggtagcacctgtttattttgaagtgagcagcaattataaaaataccgatctatatgtcaataaagaggaagccggatctgtaaagaaagcagatcaagcacaaaccctcggtccgtacattcccggcgaatatacagtctcagccaaactgaaaaacgatgtcgttgaccttgtgaaaaaggaagacattcaggcggttggcgataacagctttcgtgttgatctctcattggaagcagacgatgtgacattcagcttagcggatgacatcaagagcgggaagggagatttgctgattaacggcaagtcgattcataaagacccattcaaatccgtaacatacggtccgctgctgacagatggatcaatgacagcttcagtcgaggcagaatttccgtggggaaaaacaaaaactgccggcgttccgatcgatgataaagaaatggagttaacgttaattcctgatcaagatacacaggaacagattatgaacacaattgtcaaaacaacaaaacaatactccaaagctctatctgatgggaatacagcccagatgacagaggcaagtgccaattggaaggcggagacgaaggacaccgttgattctatgaaaagcgcggattcatacttaaaagatagatacttggaaactgattttgacctggacacatttgccctctctcagaaaaacgacggaacgtggcaggtatcggtaacaggaaaagaacttcaccagtcttcttcgtataacgactatacaaaatctgaaatgactgacgacagtccgagttatgaatatcttctttcatatgataaaaaacagaaaaagtggattttcgaagatgcagaatcaacattccaatctgcaggcacaaatataaagaaaatcaaaaatgataaaccagagacatacacttccgcctgggctggctcgaaaaacaaaggcagtgaaagctctgcaagcggcgatgttacagatgaacaagtgacattatttatgggcagttatctgcaaagtcaggcagatgccgtgaatcaaaataatttctcactgatggaagacagccttgaaaaaggcagttccctttattccgaccagcagcatctcgtgtcgaaattaaataaagaggggacaacagaagactttaataactatgaagtgaaaagctggagtcaaaatgggtcggctatcacgattaagacgtatgaagaattctacatcacaaaatcaggcggcagtccaaagctcagaacatataactggacctataccggcgtagtgaagaacggaagaatttacttaacgtctattcaataaaacaaccccatcaccagcaggtgatggggttgtttttaaaagagcatataacggaaaatttctttgacatagtgttcgataataagctgaaatgtaacgcagatgatcagataaatcacaatcgttgagtaaatgacatcaaccttccctttatatgaatgctggtaactgcccagcatcgcaggaggaatggcgaagaatgcaccgattaaaccaacggctaatatggtaaagcaaatgtctgtatgtaataaaaagaagaaaagggcaagaatcaaaatagccgtaaacggtatgagaaacgctccgaatcttgagaatgaatccttgaaagacacttggtttcccgcgattttcagggcgaaaaagatgcatgcatgcaggccaaatagaaataaaataaaataaatggttggctctaagaagattgctgtaaagcttacgcttccgggaccgtctgaaaaaagaatataaaacatcaaaggggtcagcaaactgaaaagaaccatcgtaatgattgcgctgatcagctgctctccgcctgttgttttacattcctgataagggcgtttcaggacggataagacaaatgagccgaactgttttgctgcttgctttgcagcggctccggtttgagctgcatgctggtggcctgattgaccggggagcggtgatccgcatttctcacaaaaatttccgccatctgtttgatggccgcattgaggacaatacataaaataactcctttacctgtaatatagggaaaatagactgatagttttattataaaagaaaaaagttgtaaagtaatcaatattcatacaaaaaaagacaccagcccgattgcagctgtgtctttttttatctagttattcatatatttctcaaatacatccccaaaatccttgatatgatactgcgagcgaacggatgtcagccaagtgaatccgaattcggtcaattctttatattgcgtttcaatattgacgtgctcagggcgggtatggtgaagaatcgtcactgctttatctaagctttgctccgcttgattgattaaaatgtcattttcataggttgtttcagcgatgcggagaagagctttataaaggtcttttaatttttcaatctggtctttgtggacatcaatgtcgaattgttctccgcccagcttgaacttaatttcaacatccaaatccacttttccggcagtttcaagaaaaacgtcagagattttatattgcgaataaggatagcgtttcaacgttcgtttcgaggaagtggcgcgttcgccgtctacatggatcagggccaggttcgtaaagcaatactcgtctgcttttgttttaatcaagaaataaattttctcattatcttcatgcatgacataatcatctgcgtctgttttgtcatagtcctgaggttcgataatttttccgatatcagataagcccaaggcatctgccgcaatttttttgaacatctgtatacgtccttcctattcaatttgtcacttcattgtagcatggcgcgtttctgacaggctataaaggtttaccgggaaatcgcctccgggtaaaagggtggagaatcattctatttcctgtgcagagactatcaacaaggaggtatatgatgttctcattcatcgttcacgtcttcatttctttattcgcagtatcgaatccgatcggaaacgtaccgatatttctgacgctgacagaaggctatactgcagcggaaagaaaagcgattgcccggaaggcagctattttatccttttttattctcgcggcttttttggttttcggccatcttatctttaaactgtttgatatcaacattcacgcgctccgagtggcgggcggcatattcattttcggcattgcctataatctattgaatgcgaaagaatcccatgtgcaatctcttcaccatgatgaacataaggaaagcaaggaaaaagcggatatatcagtcacacctttatccattccgatcattgctgggcccggaacgattgcaacagtgatgagcctttccgccggtcatagcggcattggtcattatgcggctgtcatgatcggtatagccgccgttattgccctgacctttctctttttccactattctgcttttatcagcagcaaactcggaaaaaccgagatgaatgtgattaccagactgatgggattaatcttagccgtggttgcggtcgggatgattggtgccgggctgaaaggcatgtttccggtcttaacctcatgatgaaaaaagcagctctcttattttagagagctgctttcttttgttttcggcacataccgaaagacttcctcactctcaaaaaattcaatcaacctgctcagccaatcatagtaatgaagccattcttttaattcactcagcagctgattgactttctcttccgcttccggggtaagcccgtccctttgtaaaagatcactcagctcccggtttaattttttatacagcactttgtttttgctcacgacctttgtccaattcgccgcaaataaagaaatgaaggtttgataataatcctgctcgacgtcataaaggtcttttcgtacgcctttttcaaacaccttttcggcgatattggcatcgatcatttcccggacaacctggctcatccgtgttttgctcatgcccgttgcctcagagagctcgcttaaggtcattggttttcgattcatataaataattccgagcacacgtccgacagttgaaggcattccaaacgtatgcatattttcggcaatcttctcaatgagatgctcttcagcatgttcaatgatgtcgagagcggtttttttcacagctgatcatcccttcaaatggcaattgatggtgtcaatatatcatatttcttcctggtgttgaaaatagctgaatgctgaggaagtgggaggtatccggcgtaattgtaagaacaccctttccgtctcggtcataacaataaataatctataaataacatataatttcaacacattgtaaactttttattttacaaagttcaaactataataaggattatacttttcagaaaatttaaaggaaacctgcggaggtgcacggattgctgaaattggaacaagtgtcaaaagtatataaaggcggcaaaaaagctgtgaacagcattgatttagatattgcaaaaggtgaatttatctgttttatcggcccgagcggctgcggaaaaacgacaacgatgaagatgatcaacagactgatagaaccatcgtctggaaggatctttatcgacggagaaaatattatggaacaggacccggttgagctgaggagaaaaatcggctatgtgattcagcagattggtttgttcccccatatgaccatccagcagaacatctcactcgtaccaaagctgctgaaatggcctgaggaaaaacggaaagaacgggcgcgcgagctgttaaagcttgtggatatgggcccggagtatttagaccgttatccgcatgagctcagcggcggacagcagcagagaatcggcgtgctgcgcgccctggcagcggaaccccctctcattttaatggatgaaccgttcggagcgcttgatccgattacgcgtgattcccttcaggaagaattcaaaaaactgcagagaaccttaaacaaaacgattgtgtttgtaacccacgatatggatgaagcgattaagcttgctgacaggattgtgatattaaaagcgggagaaatcgttcaagtcggcacacctgatgagattcttcgaaacccggcaaatgagtttgttgaagaatttatcgggaaagagcgcctgattcagtcaagaccggatatcgagcgggtagagcaaatgatgaacagaacgccggtgacggtatctgcggacaaaacgctttctcaggcgattcagctgatgagagaaaaacgtgttgactcgctgctcgttgtggaccggcaaaacgtgctgaagggctatgttgatgtggaaatgattgatcaaaaccgcaaaaaagcgagcatcgttggcgatgtataccgttcagatatatataccgttcaaaaaggggcgcttcttcgcgatacagtccgaaaaattttgaagcaggggatcaagtatgttccggtggtcgatgaacagaaccatttagcagggattgtgacaagagcgagcctcgttgatatcgtatacgattccatttggggcgacgaggaaaaccagctcatgacgatctgaccaggggaggagctcttttaagatgaatcaaatgatgacttttttgcaaacgaacggcggagagctgttgtataaaacaggagagcatttatatatttcactcatagccgttgtattgggcattatcgttgcagtgccgctcggcgttgctcttaccagaatgaaaaaaggcgcaggtgcggtaatcggtttcgtaaacattgtgcaaaccctgccgagtctggcaattttagccttttttattccgcttctcggcgtaggaaaagtgcctgcgattgtcgctttatttttctattcggtgctgccgatcctgcgcaatacgtataccggcattaaaggtgtaaataaaaacctcctggaatcggggaaagggattggcatgaccggctgggagcagattcggctcgttgaaatcccgctggcgattcccatcatcatggcggggatccgcacatcaacgatctatctaattggctgggcgacacttgcgtcgtttatcgggggaggcggcctcggggactatatttttatcggactgaacctataccagcctgaatatatcattggcggtgccgtgcctgtcacaattctggcaattattattgattatgtgctggctgtgacagaacgaaaggtgacgccgaaaggcttgcaagggatgaaggaagtttcgtaaggagttggcactgttgaaaatgacaaaaatcaaatggcttggcgcgtttgctctcgtctttgtcatgctgctaggcggctgctctctgccgggtctcggcggcgcttctgacgacacgatcaaaatcggggcgcaaagcatgacagaatcagaaattgtagcgaatatgatcgcgcagcttattgaacatgatacagatttgaataccgctttagtgaaaaacctcggctcaaactatgttcagcaccaagcgatgctgggcggtgacattgatatttcagccacgcgctattcaggaacagatttaacaagcaccctcggcaaggaagcggagaaagatccgaaaaaagcgctgaacattgtgcagaacgagtttcaaaagcgcttttcttataaatggtttgattcctacggctttgataacacatatgccttcaccgtaacaaaaaagtttgcgggaaaggagcatattaacaccgtgtctgacctgaagaaaaatgcctcccaatataaattaggcgtcgacaatgcttggctgaaacgaaaaggcgacgggtataaaggctttgtcagcacatatggctttgagttcggcacaacttatccaatgcagatcgggctagtctatgacgcagtcaaaaacgggaaaatggatgcggttttggcttattcaacggatggacggattaaagcatatgatctgaaaatcttaaaagacgataagcgtttctttccgccgtatgactgttcaccggtgattccggaaaaggtgcttaaggagcatccggaacttgaaggtgtgatcaataagctgattgggcaaatcgacacggaaacgatgcaggaacttaattatgaggtggatggcaagctgaaggagccgtctgtcgtagcaaaggaatttttagacaaacatcattattttgactaagaaaagaggtggatcatatggaagtactacaccagcttggcacatactattcgcaaaacggcggttacgtgctgcaggaattttaccgccattttctgatgtcggtgtacggcgttttatttgccgccattgttggaattccgcttggcatcctgatagccagatacagaagattaagcggatgggtttttgcggtcacgaacgtcattcagaccatcccggctctcgccatgctcgccgtgctgatgcttgtcatggggctgggcgctaatacggtgatattgtcattatttctgtattctcttctgccgattatcagaaatacgtatactgggattatcagtattgagcacgcctatcttgaatccggaaaagcaatggggatgacaaaatttcaagtgctgcggatggtcgagcttccgcttgcgctttctgtcataatggccggcctgcgcaccgcgcttgtcattgccatcggcattacggccatcgggacatttgtcggtgctggcggtctcggggacatcatcgtcagaggatcaaacgccacaaacggaaccgcgattatattagcgggagcgatccccacagctctgatggcggtgattgccgatttggtcatgggctggcttgaacgagcattaagcccgattaaaaagagaaagaagaaaaatctggcaggtgccgcataagaaaaaacgccttgtaatgacagggcgttttttacggcttcggcacatatttaaaaatttcttcgctctcaaaaaactcaatcaaacggctgagccaattataataatcaagccattcctttaattctttcagcagttcattcactttttcttccgcttcaggagtaagctcttcatccaacacgctaagcagctcccgattgagttttttatgcatcattttgtttttgctgatgactttgctccaggtggctgaaaacagcgtgataaatgtttgatagtagtcctgctcaacctcatataaatcttttcggacgcctttttcgaacaccttctcggcaatgttggcatcaagcatttcccgcactacctggctcatgcgtgttttgctcatgccggtggcctcagataattccgtaagcgtcatcggttttcgattcatataaataatgcccagcactcgtccgacggtagagggcattccaaatgcatgcatgttttccgcgattctttctataaaatggtcctcggcttgttcaatgatcgttaacggatctttctccaacggtttcatcctttcagctaacaattccgatgtcaatataccacatttttgatacggcgaaaatgctgtcaaaagagaatttggcaggaaattggagcaataaggagatcaatacacgtcaatgcgggtaaatcagcgtttacacatactttataaataatatgaacaaattgtaaactttttattttataaactttattctataatgggaagcattcaattgtctgaaaaattaaatttaaactgaacaaattgaataaacttaattttggaggtgcgatgtttgctgacattagaaaatgtctcgaaaacatacaagggcggcaaaaaagccgtgaacaacgtaaatcttaagattgcaaaaggcgaatttatctgctttatcgggccgagcggctgcggaaaaacgacaacaatgaaaatgattaaccgattaattgagccttccgccgggaagattttcattgacggcgaaaacatcatggaccaggatcctgtagagctcaggcgcaaaattggctatgtgattcagcagatcggcctgtttccccatatgaccattcagcagaatatctcactcgtcccaaaactgctgaaatggccggagcagcagcggaaagagcgggcgcgtgagcttttaaaattggtcgatatggggccagaatatgtagaccgttaccctcatgaattaagcggggggcagcagcagcgtattggtgtattacgggcacttgccgcggagccgccgcttatcttaatggatgaaccgtttggggcactcgacccgattacgagggattccctccaggaagaatttaaaaaactgcaaaaaaccttacataaaaccatcgtatttgttacccacgatatggatgaagcgattaagctggcagaccggattgtgattttaaaagcgggagaaatcgttcaagttggaacgcccgatgacattttaagaaatccggcagacgaatttgttgaggaatttatcggcaaggagcggctgattcagtcatccagcccggatgttgaacgggttgaccagattatgaacacacagcctgtaacgatcaccgcggataaaacgctttctgaggccattcagctgatgaggcaggaacgggtcgattcattgctggtcgtcgatgacgagcacgttctgcaaggctatgtcgatgttgaaatcattgatcaatgccggaaaaaggccaatctcataggtgaggttttacatgaagatatatacacagtactgggcggcacactgctgcgcgacacggtccgcaaaattttaaaacggggtgtcaaatatgttcccgttgtggatgaagaccgacgcctgatcggaattgtgacgagggcaagtctggtcgacatcgtgtatgactccctctggggagaagaaaagcagctcgcagcattgtcatagggaggggcgataagtcatgcatcatattgttcaatttttgcaaaccaatgggggcgagcttctttataaaacatacgagcatattacgatatcgctcattgctgtgatcttaggtgtgctggttgccgtccccctcggagttgtgcttaccagaatgaaaaaaggagccggcaccattatcggcattgtcaatatcattcagacgctgccgagtctggccatcctcgctttttttattccgctccttggtgtagggaaggttccggccattgtggctttgtttttctattccgtattgccgattcttcgcaacacgtataccggcattcgcggcgtcaacaaaaatctgctcgagtctggtaaaggaatcggaatgacgccggctgaacaagtccgcttggtggagctgccgcttgccgcaccagtaatcatggcgggaatcagaacatcgacgatttacttaatcggctgggccacgcttgcttcctttatcggaggcggcggattgggtgattacatttttatcggactgaatttatatcagccggaatatatcatcgggggcgcggtacctgtcacgatattggcaattgtgattgattatgtgctggcagttgctgaacgaaaactgacacctgccggcatgcagagattgaaggaattgtcataaggaggcggctcatgaaaagaaaatatctcaaattaatgataggtttagtacttgcggcaacgctgacgctgagcggctgttcgcttcctggtctcagcgctgctgcagaccagaccattaaaatcggcgcgcaaagcatgagcgaatcagaaatcatcgccagcatgcttggccagttgatcgaacaccatactgatctcaaaacaacaacgattaaaaatcttggctccaacgcggtgcagcagcaggctttaatgaacggggaaattgacattgcggccacaagatatacgggagacgcgctgacaggcacgttgagaatggaacctgaaaaagatccggacaaagcgctggcgcttactcagcgggagtttaaaaaaagatacaatttaaaatggtataactcctacgggtttgataatacatatgcctttacagtcagcagggagctggccgaccaataccatttagagaccgtatcagacgttaaaaaatgggcgccgcaattaaagctgggcgttgataactattggatgaagctcaaaggaaacggctatcaggattttacgaaaacctacggcatgacattcggcggcacgtatccgatgcagatcggccttgtgtacgacgcggtgaaaagcggaaaaatggacattgtgcttgcgtattcaaccgatggaagaatcaagtcctatggtctcaaaatgctaaaggatgataaacaatttttcccgccgtacgactgctctccggttgttccggaaaaggtgctcaaagaacatcctgagcttgaaggcatcatcaagaaaatgctcggaaaaatcgacacagccacgatgcaggagcttaactatgaagtcgacggcaatctcaaagaaccgtctgtcgttgccaaggaatatttagaaaaacatcgctatttcgaatcgtgaaagggggaagaggtcaatgaacgtgcttgaacagttaatgacgtattacgcgcagaatggcagttacgtcatggatgaattcggccgccactttctcatgtcggcttacggcgtattgtgtgccgctgtcgtcggggttccggccggaatcctcatcgcgcattttcgccgtttgtcagcctgggtgtttgccgtaacaaacgttattcaaacaatcccggcgctcgctatgctggccgtcttaatgcttgttatggggctcggcgcaaataccgtgattctatcattatttctgtattccctgctgccgattattcgaaacacgtacacaggcattatcagtattgaacatgcctacttagaatcgggaaaagcaatgggcatgacgaaattccaagtgctcagaatggttgagctcccgctcgcactttctgtcattatggcgggccttcgcacggctctcgtcattgccattggaattacagcgatcggcacatttgtcggtgccggaggccttggggacatgattgtccgcggctcaaacgcaacaaacggaactgcgattattctagccggagcgataccaactgcggtgatggcggtaggggcggatttgctcatggcctggctggagcgggcattaagtccggtgaagaaaaaaagaaccggggcgaaacacgttcaatcagctgcatagaatagaaaaaagaggctggagtccagcctcttttttctatttaaatcgtaaactgacccatcttctcattaagctccttggccagctgctcaagctcttcagcattttgaagcacttgatccatcgaataggcggattgctcggttattgaaaatgtttcttcaatgccggcggccgactcttcggatacagaagcgatattttcaatcgattgattgatagtaatcgattggtttgttaactgcttcaggccatccgttacttccttaatgctgtctgcaacatgagtgacggattgcttgatatgccgcatagcctgtccggtgtctgtcaggttttccgttcctttttcgacttctgtaaagctgctttccaagtacgtaatgacagtgtggatctcctgctgtgtcccgcctacaatccgggtaatatcctgcacggaatcagaaacgccgtcagccagctttctgacttcatcagccacaacggcgaagcctttgccgctttctccagcgcgggcagcttcaatcgcggcgttaagggacagcaaattcgtttgctcggcaattccgttgatgacttgaacgagcttgttaatatcctgagaatgctgttccagtgatctcactttatgcacggcttcttcaacaatatgatggatggttttcatttgctgtaatgacgtagccatattttcgtttccgcttaccgcgagttcgagaacgttttgagacgtatcgctgatggtgatgccgtgattataggctttatcaatgctttcagtgaactcattcatcgattcggcaatcgtcaccgcgtcttgggcctgctgttcagagccctcagccatttcgttcatcgtttcagtaatatgtttgctgccggatcttgtttcattcgttgcggttgcaagcacctgtgaagaagaaagaacccggcttgatatgtctttagaatatccgacaatatctctcagattccctaccattttttgcagcgcttcattcagatcacccagctcgtcttttgagttgagcggctccatatcgttcgacagatcgccttcggcaatatgattggcagattccttcatgcgaatgataggctttacaatgtttcgcgtgatataaagccagatgaaaatgctgatgaggattgatgctgccacaagcaaagcagtgtaaatgagccctttatgatagacggccttcgtttcttttaccgctgtgttgctgccttcttgatttaagtcaacaagctgagtgattgtttttttcatatcctcaaagctggcctcagtctgaaccaataaacctcttactttgtccatgtcattcgtgcggccgctttcgataatttgcgcatgaatatccatataggtattcacttcagtttgaagctgctcgaacagtttctgctctttatcagtggagatcgttttttcgtagttatcgagcttttggttaatgacttccatgatttgattcatttcttgatcaagtgtatccattttgcttttgtctgtataaatcagaaagtccttttctttagaagacaggtgctcggttacataattaattgaagtgatttctttgatgccgtcaatccattttgtgttgatttcatctgttttttgaatgatatgctgcatattaagaacgcctattccgcctacaagtaaattgatcaggatcagtgtcaaaaataccaggctgaatttgcgggaaatcgtcagtcgcatatagtggtctcctttaaaaacgtaatgtgtggatgtactatatatcggctgagaaatcgttttctcacctgggaaaaaataaaaaacggctcttttctcgtctttgagatcagaaccgttttagcaattagtcaagaaaggaagggtcaatccattcagtcgcccatttagaaatctcacctaatatgggtgctagtgcctttcctttatcagtcaatgaatattcgatgcgaaccggagtttcagggatgacatcccgcttcactactccttcaagctcaagttctttcagccgttctgacagaactctgccgcttagatttggaagtgctgcttcaatttcgctaaatcgctgcgacccgttcaagagctgaaatacgattaaagcgacccagcgtttacttaagatgtcgactgctttttcaaatctaggacacatttctgattggttcatacttttcacctcgtctgtcactattataacgcaaataacgagggagggtatgcaagcgtgattgataaaatatagaaagagaaacaggggattatgaggaagaggcgcgtttttttgcttctgaagacaaaaaatcgaagtatttgctgagattttcaatatcctgctttgagagatgttcccatttttgactattgaaaatcgggaggtgctccgctccgcgtgtgacagccgtctggtaaatttcataaacggattgatagctttcagatgcttcgcggatttcttcaggaaaggcctgaatatggcctgcggcggccattaggttttcgtacggcactttcaggacggctgccagttttttaatcgtggcgggttttggcgtcccgcgtttgccgttttcaatttttgaaatggtggccgagctgatgcctgagtacaccgcaagctgattcactgtcagtttgcgggcgcggcgcagctcccgtaattgctgtccgaacggtgacatggtctatcgcctcacatttctatcaagagtcagtcatcagcagaccgttttttggcttcgtctgaaataaacgaaaaataatgatccagcatgagcaaatcttctttattgagatattgccacttttcgttctcaagaagcgcaaggtttttcaggtcataggcctccgctttttcaagcagcttgcacttcgtttcgtaaggggccctggcttcatgcacttcttcgatgtaaccagccttgtacataagcccctcataaggaatttttaaggcctctgccagttttttgatggtggcaggtttgggaacgccccgttttccgttttcgattctggagatgccggccgcgcttacgcctgaataagtcgccagctggttgactgttaactttctctcttcacgcaatgcccgtaattgttcgccaaagctttccatatatctcaccccgtccctcactgttactcatattttagtatgtttattgactaaagggaataggtagactggaaatgcattgacaaaagttaacataagccgtaatgtaaaagtatagaaaaaagtttttcaggaatggaaggtgaggaaagtgccagtagaaaagatacagattagacgtgattatgtcttgcagtatatggttaataacgattattcccttaatcagcttgcgctggaaatcggagtctcacccgccacactgagccgcgtgctgaatggagaaagaaggccggggcagcttgtgattggtaaaatgcttcactattttaatttgaaatttgaggatcttttttactatgattttgttgacaaaagtcaataaagtaacaaaaaacgcaaggaagccaagcgttttctattcctatgaatgatgtgtcagcacaaaccctgtcaccagctcattgcacgttttccattgttttgtcggcaattgatgtccctgatattccaatctgaaaaattcggcatgtctgcacgatcttcggtaatagcctgcgtttgtaaaggtccagtcccgcaggccgccatacataaacagcattggcatttctaggcggggcagctgttcaatgcagttgtagccaagcgaatccagataatactgatgccaatgggcctggtctgcttttttcatatggtctgttaatatgctgcgaagctgtctgtcttttgtgtggctgccagagaggattttcatgagcaaaccggggtttttttcaagcagatacattcccagtttgtgcagcttctggccgattacgttatgaacagcggggtaggcgccggacagaataaggtgtgacactttgtccgggcgggtgaagccgatatgctgcgcgattaagcctccggcagaatacccgaataacacagctttatcaatgtgcaaagcgtccatgaattgcgcgatctcgtttgcgtaataggaaatagacgctggctgatcgatgtgattactatcaccgtggccacttaaatcgggaaaaatcaccctgaaatgcttggatagaaggcactgataataaaaaaacttgcgtcccatgcccggcgggtggataaaaatgataggaattccctgtccatattcttcataaaaaagatgtttcctgctgtctatgctgataagcggcatcgcttttctcctttgaccttttcattatgaatagggtaaccaagataaaacgtcttatccggccttttggcgtctgatacagcgtgacatgccaacccttttcatgtaaaatagaagtaatgtagccagtgagtctggaggtgtatgggatgcacgcagttttgattaccttattggttatcgtcagcattgcacttattattgtcgttttgcttcaatccagtaaaagcgccggattatctggtgcgatttcaggcggagcggagcagctcttcgggaaacaaaaagcaagaggtcttgatttaattttgcaccgcattacggtagtgctggcagtcttgtttttcgtgttaacgattgcgcttgcttatatcctatagggcaatgtttgtataaggtctgatgtgaagtcaggcctttttcacgtttcttgatgatattcaaaacgtttttttctgattaaactgtggaaaactaaaatgatcgtgcagatagaaagggagacatgagcatgaaagttgtgacaccaaaaccatttacatttaaaggcggagacaaagcggtgcttttgctgcatggctttacaggaaatacagcggatgtaaggatgctgggacgatatttgaatgaacgcggctatacgtgccacgcgcctcaatatgaaggacatggcgtcccgcctgaagaacttgtacatacggggcctgaagactggtggaaaaacgtaatggatggctatgaatacttaaaatctgaaggctatgagagcattgctgcctgcggactgtcgcttggcggggttttttcgctgaaattgggttacactgtacccataaagggaattgtcccaatgtgcgcaccgatgcatattaagagtgaagaggtcatgtatcaaggcgttctttcatacgctcgcaattacaaaaagtttgaggggaaaagcccggagcaaattgaagaggaaatgaaggaattcgaaaaaacgccgatgaatacccttaaggcgctgcaagacttaattgctgatgtgcggaataatgtcgatatgatttattcaccgacatttgtggtgcaggcccgtcatgaccacatgattaataccgaaagcgccaatattatttacaacgaagtggaaactgatgataaacagctgaaatggtacgaggaatcagggcatgtcattacactcgacaaagaacgtgacctcgtccatcaggatgtgtatgaatttttagagaagctcgattggtaatcaacaggaggtcggataatggaaaaagaagcatttatggaaaagcttctctcgtttatgaaggaagaggcgtacaaacctctgaccgttcaggaacttgaggagatgttaaatattacggaagccgaggagtttaaagagctcgtcaaagcgttagttgccttggaagaaaaagggcttatcgtacggacgagaagcgaccgctacggcattccggagaagatgaacttaataaaaggaaagatttcagcccatgcgaaaggattcgcctttttgctgcctgaggatacgtcgttaagtgatgtgtttattccgcctaatgagctaaatacggcaatgaacggcgatatcgtcatggtgcgtctgaattcacagtcaagcggctccaggcaggaaggaaccgtcatacggattttagaaagagcgattcagcgggttgtcggcacgtatacagaaacgagaaacttcggctttgtcattccggacgacaaaaaaatcacgagtgacatcttcattccaaaaaatgggaaaaatggagctgcggaagggcataaggttgttgtcaagctgacgagctatcctgaaggccgcatgaacgcagagggtgaggttgaaaccattctcggccacaaaaacgacccgggcattgatattttatcggtcattcataagcacggcctgccgggagaatttccagctgacgcgatggaacaggcatcaagtacgcctgacacgattgatgaaaaagatctgaaagaccgccgtgatctccgtgaccaggtgattgtcaccattgatggtgcggatgcgaaggatttggatgatgcagttaccgtgacgaaacttgatgatggaagctacaagcttggcgttcacatagctgatgtcagccattacgtaactgaaaactcgccgattgacaaagaagcgcttgaaagagggacaagtgtgtatctggttgaccgtgtcatcccgatgattccgcacagattgtcaaacggcatctgctccttaaatccaaaggttgaccgcctgacgctttcttgtgaaatgacaattaacagtcagggacaggtgacagagcacgagatcttccaaagtgtcatcaaaacaacggaaagaatgacatattcagatgtgaataaaattcttgttgacgatgatgaagagctgaaacaaaaatacgagcctcttgttccgatgttcaaagacatggagcgtctggctcaaattctgcgcgataagcggatggaccgcggcgccgttgactttgatttcaaagaagcaaaggtgcttgttgatgacgaaggagcggttaaagacgttgtgatcagagaacgctctgtcgccgagaagctgattgaagaatttatgcttgtagcaaacgaaacagtggcggagcatttccattggatgaacgtcccgtttatataccggattcacgaagagccgaatgctgaaaagctgcaaaagtttttagaatttgtgacgacatttggctatgtggtgaaaggaacggcggggaatattcatccgcgcgcgctgcaaagcattctggacgctgtgcgtgacagaccagaggaaacggttatatctactgttatgctccgttcgatgaaacaggcgaaatacgacccgcaaagcttggggcatttcggtctgtcaacggaattctatacgcatttcacatcgccgatccgccgttacccggacttaatcgtccaccgtctgatccgaacgtatttgatcaacggcaaagtcgatgaagcgacacaggaaaagtgggctgaacgcctgccggatatcgccgaacatacatcatctatggagcgccgtgcagttgacgccgagcgtgagacggatgatctgaaaaaagcggaatacatgcttgataaaatcggtgaagagtttgacggcatgatcagctctgtgacaaacttcggaatgttcgtcgagctgccgaatacaattgaaggactcgtccacgtcagctttatgacagatgactactaccgatttgacgaacagcatttcgcaatgatcggcgagcggacaggcaacgtcttccgcatcggggatgaaatcacagtcaaggttgtcgatgtcaataaagatgagcgcaatatcgactttgaaattgtcggcatgaagggcactccgcggcgtccgagagaattggacagcagccggagcagaaaacgcggaaagcctgccagaaaacgtgttcaaagcaccaatacacctgtgtctccagctccgtctgaggaaaaaggggagtggttcactaagccgaagaagaaaaagaaaaaacgcggcttccagaatgctccgaaacagaaacggaaaaagaagaaatagcagctcaaccagcaaatagggccgcagcgctctatttgctttctttcggaaacagcttttcattgtagcagtacgtgacatttggtaaaatagagcgtatcgcaaaaggtggacagtttttccttagagagaggaggttctggcatgccaaaagggtcaggaaaagtattatctcaaaataagaaagccaatcacgattattttatagaagaaacctatgaaacaggcatcgttctgcaaggaaccgaaatcaaatcgattcgcgccggccgcgtaaaccttaaggattccttcgccaaaatcgaacggggagaagtgtttctccacaatatgcacgtcagcccatatgagcagggaaaccgctataaccatgatccgcttcggacaagaaagctgttaatgcaccgcaaggagattaataagctgatcgggttaacaaaggaaaaaggctattctctcgttccgctgaagctgtatttaaaaaacggctttgccaaagtgcttctcggccttggaaaagggaagaagaactatgacaaacgggaagatctgaagcgcaaggacgcgaagcgggaaatcgaaagagcgttcagagacagtcaaaaaggcttctaaggcatagtgcttgattcgaaaatcaggcctgtgctatactgtgttcacgatcagatcacgacgccattcatttgaaggatttgacaattgaaaagagccgtgatcatgttataataagactatagccagtttgagtgagagcttgatattttctcccgtatttcccttataccaaggggacgttacggattcgacagggatggatcgagcttgagctgcgagccgagaggcgatctcgtaaacacgcacttaaatataactggcaaaactaacagttttaaccaaaacgtagcattagctgcctaataagcgcagcgagctcttcctgacattgcctatgtgtctgtgaagagcacatccaagtaggctacgcttgcgttcctgtctgagaacgtaagaagagatgaacagactagctctcggaaggcccgcccgcaggcaagaagatgagtgaaaccataaatatgcaggctacgctcgtagacgcttaagtaatcgatgtttctggacgtgggttcgactcccaccgtctccatacatactgacaataaagcagaacctcttaagaggttctgctttattttttctccaaaccacaggcaccaaaaagtgcgtacttccatttcgatcccagctgtttcatactgattgcagagcagatgtttcaccaatcagatttctgtcaataaataagaggaatcaaaaacggagggatgaataatgaagctgaatttacaaggaaaaaccgcactggtgaccggttcgacatcagggatcggaaaagctattgcctcttcgttagctgaagaaggtgcggcagtgatcattaacggacgccgggaagagaaagtgaatcagacgatagatgaactgaaaacacaacatgctgaagcggttctttatccggccgcatttgatttgggaactgaagaaggctgcaatgagctgtttcaggcatatccagaggttgatattttggtcaacaatttagggatttttgaaccggcggagtactttgatattcccgacgatgaatggtttcgtttttttgaagtgaatattatgagcggtgtaaggctgacacgcaggtatttgcataacatgatagagaaaaaagaagggcgtgtgattttcattgccagtgaagcggcgattatgccgtcacaggaaatggcccattacagtgcgacaaaaacgatgcaactgtccatttcccgcagtttggcggagctggcaaccggcacgaatgtcacagtcaacaccgtcatgccgggctctaccttaacagagggtgtggaaaccatgctgaactcgctgtatcctggtgaaaacctgactgttcaagaagctgaggcacgttttatgaaagaaaaccggccgacatctattattcaaagactgatccgtccggaagaaatcgcccacttcgttacatttttaagcagcccgctttcctctgcgatcaatggcgcggcacttcgggcagacggcggtttggtccgcagtgtcttttaaacctctcccaacaggagaggtttttttatgtattgttgatttccataaatttctgccgtataatattggtaccgaaatagttttcttggtaccgaaagcgggggattaatatggataaaagaattctggcggaaactttccggctgatcaagcaaaaaggattttcatttacgatgaatgatttggctgcagcgctgggaacgagcaaacggacgctctatgcatattattcatctaaagatcagcttgttgaggcggttgtcgaacaatttttagccgaaatgaagcaaatggaaagagacatctatgaaaatgaaagtttaaatgtgcttgaaaaggtgaaaaaaatgctgatcagccttccgcaggggatggaactgctgaacatgggattattaaatgaactaaagaaataccattacgatgcgtggcttacattagacacgtttattaaggaagaatgggccattgtcctagaattattaaacgagtgcaaacagcaaaagagaatcagaaacatcaatccggacctgtttattcacatgtatatagggagcatcaaccaagtgtatgaccctgaatatccactgaaacatcagttcaccacaggagaggtgcttgaatcaattgtagatgttttgtttaacggtataacagctgatgaggaggctgatgccacgtgaattgggtgtttctatgcttggcgattttgtttgaggttgcgggaacggtcagcatgaagctatcgtctggttttacaaagcttattcccagtttgctgttgattttcttttatggagggagtcttttctttctgacgcttacgcttaaatccattgatgtatcagttgcttatgctgtatggtcagggatgggaattgtcctgattacagtcgttggttttttgttttttcaagaacatgttagtgtcatgaaagtcatttcaattggattgattattgccggtgttgtgtctttaaacctgatcgagcatgctgcggtgtctgagccggtacataaaagcgggcagtacaaatgagatatatgaagctgttttttctcgtgactgatatcggttttatcttgtactggctgtcagccggattttcgctcataccggaaaactgggcttttaaacatcatgaccatccgtttatgatcgcttggaactggtctttttttccgctggatatcctgatttctgtcacagggttgtacagcttgtacctacagcgggtgaatcgtgctgactggaagctgatggcgctgatttctcttgtgctgacctgttgttcaggtctgcaggcgctatcattctggacattcagcagtgactttgatcttgtgtggtggctgtttaatgggtatctattgatttatcctttattttttattcacctgctcttgaaggaaggcagaaggacaaaacagtcctgacaggtgccgcttttatgataataaactgatgtaatgaagcagagacggtataagtctctgtttttttatcgggcgcaccaattgagaagctaaccgcgtttttgggcatactaaagtgaagaaacgggaaaagttctacacattcattgaaaaggattttgtcaaatgaacaaaactgctgcgaacaatcaaagaatcatgcctatcgtgaaggatgcctttcgcattcatgcaaatccatttccttggaaaaaggctatcggatcaggtttcgcttcagggtttcctgtgctggtcggtgcattggcaggtcacacggattacggattaattgcaagtatcggaggctttgtttatttatatgcgggcggtgaatcgtacaaaaagcgcgccatgaagctgctcttgatttcctttgggatcgccctctcatttggtttagggacgcttttgtctgggacgctttggatgatggcagctgttttggggctgatcggtgcagcggcgatgtttatttttagcgcgctcggcattcaaggccctgcgccgatgttttttgtccttgcctttttagtcagttccgggctgccggccgatccttcacaagcgctgttcagagcgggactgacgtttctcggcggcattttcgccatgggtatcgctttaatcggctggttatggaacaaacatggaccggagggagcggtgctgcaaaaaacatatcatcagctggctgcatgtctttcagccgtcggaacgccaggttttcataatgcacagcatcagacggtgctcatgcttagaacagcccgccaaacggttcttgggaaagggaacagacggaaaaaatcgcggcatgatgaacgatttttccgcctccttgaaaaagctgacgacatattccttgccattattcatttttcagctgaaacgccggacagagagaccgcgcagattgaaaaggcacttcgccaaaccggagatatgcttgcgcatgcacgggtttccggtacgtttcagattaatgagaacgaatctgagcctaggcggaagctgtttgaagaaatcaatgaggttttgcatatcgcttcaggacgttttgataagcagcttgacggggagccgagccgcctgccatcctctttttactttttgagaaatgcctttgactggaagtctccggttttgattagagcgttaaagtatggaattgttctgtttgccgccgatatgtttgccctcgcattcggctttgcacgctcctattggattccgctttcggcagcagcggtcatgcttggcactactgttgtttttacgcttcacagggctattcagcgttcggtcggaacggtgatcggtgttatgctggcaggcgcaatcctgttttttaagccgggcggtgtttatattgcgttatgtattgcagcgctgcaatgtcttcttgagatgctgattgtccgcaattatgcgctggctgttccctttttaacagcaaacgcgcttgttatcacagaaagtatgcatggcggcgcgggagccggttattttatgatagcgaggctgacggacgtagctgtcggcagcgtgatcgggctattgggaacaattcttttgtggcggcggttttcaacgaagcggctgcctgaactgatgaggaacgtcatccggttggaagggcagtttatggagaaactgttaaccgggcagaatgccgacgaacacaagttaagggtgagccttgtcaggcttcgggatgcgtatgacaaggcccttggcgagtttcctcatgcgaatgcggaggcgctctggcctgccatttccggtgctcagcacttagggtactatttgctctcggcgcaagctcaccgccgtccgcctgctccgttttctgatgaagagatcaaccagctgcgggcgttttttgaacaggctgagcaatcctttatagtgaaaaggatgcctgcggatattcaagtgccgcatgtccctcattatcctcggatcagtaaagaattgtccgcgctgtattccggcttgagaacagcttttgaaaagtaagctgtttgggaaagttaaataatctttaattcgagatgttttacttgaaagtaaatttctttgtctctataataaagtctaagagagacagaataatcattatgcatctgtatgataataattgatgtgtgatttttaaaaacgaaagggctggtaaaaatggcaaaagtattatatatcactgctcatccgcatgacgaagcaacttcgtacagtatggcaacaggtaaagcatttatcgaatcttacaaagaagcgaatccaaatgatgaagttgtacatatcgatttgtacaaagaaaacatcccgcatattgacgcagatgtatttagcggatggggaaagcttcagtcaggtacaggctttgaagagctttctgaaagcgaaaaagcgaaagtaggccgtttgggagagcttagcgatcaatttgcatcagctgataagtacgtatttgttactcctttatggaacttctcattcccgccagtgatgaaagcgtatctcgattctgttgctgttgcaggaaaatcattcaaatacacagaacaaggccctattggcttgttgactgataaaaaagcaattcatatccaagctcgcggcggctactattcagaaggccctgcggctgagatggaaatgggacaccgctacatcggcatcatgatgaacttcttcggcgtaccatcattcgaaggcattttcgtagagggacataatgcggagcctgataaagcacagcaaatcaaagaagacgcgattgcgcgtgcgaaagaagcaggaaaaacattctaatgaaaaagcctccccttatttggggaggcttttgttttagtgctccagcataatggttcgtttctctttactgcttttcatcgcggcttcaatgatgcggatgacattaataccttcctcagcagtgactggcagcgcagcaccttcccgtatgctttccgctattttgcggtaataagtaaggtaggagccatttactgatgggatcgtttctgtttttttgccggagccacgaatggttgtaagctgtccgtaaaactccggatcatctgcaccccagctgtcatcctctggttttcttcccgctctgagtgcgtcttcctgtccgtcaattccgtatttgataaagctggaatcttttccatggatttgataacgaggtccgtttgccggaacgattgatcccccgtatagaatggcttgaagcttgccatagtccagggttaaatgaaaatagtcaaccgtttcggcattttcccgctgggccatcacgtttgcagtcacggctttaggcatcccaaacaaatgcagggtttggtctatgatgtgggagccgagatcatacagcgtaccagtggcaatgccttctttttcccgccaccgcgcttgaacttcaggtctgtagcggtcataggaaacttgatatgtattgatatcttcaagagatccctcagagatcagctttttaatcgttaaaaagtcgttatcccagcgtcggttatgatatacgcttaataatacgcctttttcatcggcagccctttttaatgtttccccctcttcggctgttgctgtcattggtttttccatcacaacatgttttccggcctgtatgcatgccatagcatgatcgtaatgaaggccgctcggggtggtgacaatgacaagctcaatggcagggtcatttgtgatttcctcaagctcatgtacaacctcagcatctggaaagtcccgtttcacttcttctgtccgagatgtcatgattttgctgatttgatattcatccagaacatccagcagcggcccgtgaaaaacagaaccggacaatccgtatcctaatattccaaccttgatcgtatccacttttcttctcccctttaaaagcgttatcaacagaagtatataccctcctgatcaaatggtaaaacctaactgattcattttttgcgtcggcatgcttagacaaccgtttggacaatcagtataatgggaattaatatcattaaacagaggtgtacgcatggaaaagcataacgaacataaaacattaaaccataaaagctcgaaagaaaaagatcagattacaaaccggcttaagcggattgagggtcaagtccgaggcattcaaaacatggtggaaaacgacagatattgtgtagatattcttgtgcaaatttcagctgttcaggcggcaatgaaaaatgtggcgcttcatttgcttgaggatcatgcccatcattgtgtagcagatgccatcaaaagcggcgacggggaacaggccatttctgagcttttggacgtatttaaaaagttcacaaaatcataaagcgtttttttattgtaataccctacgggggtatggtaggatgtaaatagaaagaataaacaggaggaattgattatggaacaaaaaacattgcaagttgaaggaatgtcttgtcagcactgcgtcaaagcagtagaaacaagcgtaggagaactggacggcgtcagtgccgttcatgtcaatctggaagcgggtaaagtcgatgtttcgtttgatgctgacaaagtatcagtcaaagatattgcggatgcgatagaagatcagggctatgacgtagctgagtgattcaaggtatcgcgcctttagggaggcgcgatatttctttcatttttatataccccccaggtgtatataaaggagtgagtatgttgagtgaacaaaaggaaatcgcgatgcaggtctctggtatgacctgtgcggcatgtgctgccagaattgaaaaaggcctgaagcggatgcccggtgtcacggatgccaatgttaatctggcaacggaaacatcaaatgtaatctacgatcctgctgaaacagggactgcagcgattcaagaaaaaatagaaaagctgggctatcacgttgttacagaaaaagctgaattcgatattgagggcatgacctgtgcggcttgcgccaatcggattgaaaaacggcttaacaaaatagaaggcgtcgcaaatgcaccagtaaacttcgcattagaaacagttacggtcgaatacaatccaaaagaagcgtctgtcggcgatttgaaagaagcggtagataagcttggatataagctaaagttgaagggtgaacaggacagtgaggctgctgctgctaaaaagaaagaagaacggaagcaaacagcgagactgattttttcagctgtcctgtcatttccattgctttgggcgatggtgagccattttacatttacatcattcatttgggtacccgatatatttctcaatccgtggatgcaatttgcgctggcgacaccagtccaatttctgatcggctggccgttttatgtgggtgcgtataaggcgctcagaaataaaagcgccaatatggatgtattggtcgccctcggtacgacggctgcttacgcttatagcctttatcttacttttcaaagccttggctctcacgggcatacagatggcctttactatgaaacaagcgcgattttgctgacgctgattttattaggcaagttgtttgaaacaaaagctaaaggccgttcctcggatgcgattaaaaagctgatgaagcttcaagcgaaaacagcgactgttgtaagagacggacaggagcaaatcatcccgatcgacgaagtgcttgttaatgacattgtttacgtcaaacctggcgaacgaattcctgtcgacggagaagtggttgaaggcggttcagcggttgacgaatcgatgattacaggagaaagtcttcctgttgacaaaaatcctggtgacagcgtgacaggttcaaccgttaacgcaaacggtttcctgaaaattaaagctgtcaacgtcggaaaggatactgcgctttctcatatcatcaaaattgttgaggaagcacaagggtcaaaagcgccgatccagcgtctcgctgaccagatttcaggcatttttgtgcccattgtattggggatagccgttctcacttttctcatttggtacctttgggcggctcctggcgattttgctgaagcgatcagcaagttcattgcggttcttgtcattgcctgtccttgcgccctcggtcttgccactccgacaagcataatggctggatctggacgcgctgctgaattcgggattttatttaaaggcggcgagcatttagaaaaaacacatcgtctcgataccattgttcttgataaaaccggaaccgtgacaaacgggaagccgcgtctgacggatgccattccattcggccgttttgaagaaaaagatttgcttcaatttgcagcggcagccgaaacgggatcagagcatccgcttggcgaagcgattattgctggcgtgaaagataaagggcttgagataccgaagctaacccgttttgaagcaaaagtcggcgcaggcattttggctgaagccggaggaaaaagcattctcgtcggcacaagaaaattaatggagagcgaacaggttgagcatggggctcttctcgccaaaatggaagagctagaggcagaaggaaaaacagttatgcttgtatccattgatggagaagcagcggggctagtagcggttgcagatacgattaaggatacgtcacggaaggctgttgcccgtctgaaagagttgggccttgatgtcatcctgatgacaggagacaatcgcagaaccgcagaagccatcgcgaaggaagcgggaattacgaatatcattgcggaagtccttcctgaacaaaaggcagcagaaattgcccgcttgcaaaaagaaggccgccagacagcaatggtaggcgacggaattaacgatgcgccggcgcttgccacagctgacatcggcatggcgattggaactggcacggacattgccatggaaacagcagacattacactgattcgcggcgatctgaacagtattgccgacgcaatccgcatgagcagattgacaatgaaaaacattaaacaaaatttattctgggcgcttggctataacagcctcggcatcccaatcgcagcacttggatttttagcaccgtggatagcaggagcagcaatggcattcagctccgtttccgttgttctgaatgctcttcgtctgcaaaaagtaaaatgaaaaaccggctatatgccggtttttgtttttcattgacactttcttggaaaacaacatataataggtgtaacttatatatgagtatatgctcatatatattaaaatgaatgcaatactcattgatacgctttgaaaagggaaccctaaatcggaaggtaaggtgagactagtgaaacaggaatacgttctggacggtttggattgcagcaattgtgcccaaaaaatcgaaaatggagtcaaaggcataaaaggcattgacggatgcgcggtaaattttgcggcaagcaccttaactgtctcagccgatgggaaagaagagcaatgggtcacgaataaagtagagaaaaaagtgaaatcaattgatccgcatgtaacggttcgccaaaagcatataaagaaatcagctgatgatggctatcgtaatagaatggtcaatatgctgatcagaatggcggcggctgtcattctcggcgcagcggcatatttggttcattcgggaaccattgaatttttccttttcctcggtgcttatttgattatcggcggtgacattataatccgcgcagtcaaaaacatcatccgcggtcaggtgtttgatgagcatttcttaatggctcttgccacaatcggcgcttttctgattcagcaataccctgagggggtcgccgttatgctgttttatcaaatcggtgagctttttcaaggagccgcggtcagccgttccagaaaatcaattagtgcgttaatggacatacggcctgattacgccaatctcaaaacaaaaaacggcatcgaacagatttccccggaggacgttcagacaggagacatcattgtggttaatccgggagaaagcatacccctggacggtaaggtcgtgcaagggtcagcgatggttgatacatctgctttaacaggtgagtccgttccgagaaaagctgcggaaggacaagatgtaatgtcaggctttatcaatcaaaacggcgttctgcatattgaagtcacaaagggctatcaggaatcagcagtatcaaaaatattagacttggttcagaatgcgagcagccgtaaagcccggacagaaaactttatcacgaagtttgccaagtattatacacctgttgttgtgatcattgcggtattgctggcctttgttccgccgcttgttctttctggcgccgcgctttccgattgggtgtaccgcgcgcttatctttttagtgatttcttgtccttgtgcgcttgttgtctctattccgctcggtttcttcggaggaatcggagcggcctcaaaggccggagtgcttgtaaagggaagcaattatttagaagccttgaatcaagtcaaatacgcggtgtttgataaaacgggaacactaacaaaaggcagctttgaagtgacagaaatcaaaccagcggaaggttttacaaaggatagattacttgaagcggcggcatacgctgagcttcattcacagcatccgattgctgaatctgtgcgtaaagcttacgggaaaatgctttcctccgatgagattgagtcatacgaagaaatctccggccacggcatttttgcaaaggtaaatggaactgagatccttgccgggaataaaaagctcatggaaagagaacaaattgaggatgtcccggatgaaaatgctggaacaatcgtacacgttgctgttgatcaacgctatgccggagcaatcatcatagcggatgaagtaaaggaagacgcagcacaggcggttgctgatctgaagtcgcttgggatcaaacagacagctatgctgacgggtgattcgaaacaaacgggagaagccgtcggaaaacagcttgggattggtgaggtatatgcagagctgctgccgcaagataaagtcgcgcaggtcgaagcattagaagctaagcttttgcctagtgaaaaactcatttttgtcggtgacggcatcaatgatacgccggtgcttgcacgcgcagatataggggttgcgatgggaggccttggctcagacgccgcggtagaagccgcagacatcgtgctgatgacagatcagccgtcaaaaatagcggaagcgattcggattgcgaaacggacacggcgaatcgtgtggcaaaacatcggctttgctttaggtgtgaaagcgatctttctcattcttggtgcatttggaattgcgaccatgtgggaagcggttttctcagatgtcggcgttacactgcttgctgtggcgaacgccatgcgcgtcatgcgtctcaaaaataaataaattgtcggagagaattcattttttcggggttttcttatcagcgcttgtcttgttaaaataaagaagtgggtcaattgcgatccgcttcttttttaattttaaaacgatgaggtgtcggagtgaaaaagaaacagcagtcttctgcgaaattcgcggtcatccttacggttgtggttgttgtattgctagcagccattgtcatcattaataacaaaacggaacaaggcaatgatgcggtttccggacagccgtctatcaaagggcagcctgtgcttggcaaggacgatgcaccggtaactgtagtagaattcggagattacaaatgtccgtcttgcaaggtgtttaacagtgacatctttccaaaaatacaaaaagactttattgataagggcgatgtgaaattttctttcgtgaacgtcatgttccatggaaaaggttcaagattagcggctcttgcatctgaagaagtatggaaggaagaccctgactctttctgggatttccatgaaaagctgttcgaaaaacagccggatacggaacaggaatgggtaaccccaggcctccttggtgatcttgcaaaaaacaccacaaagataaaacctgagacgctcaaggaaaatcttgataaggaaacattcgcttctcaagtggaaaaggattctgaccttaatcaaaaaatgaacatacaggcaacaccgacgatttacgtcaatgataaagtgatcaaaaattttgcggattatgatgaaatcaaagagacaatagaaaaagagctgaaagggaagtaacgatatgaaaaatagaatcgtatttttatatgcttcctgggttgtggctcttatcgctatgctgggcagcctgtatttcagtgaaatcagaaagtttattccatgtgaactgtgctggtaccagcgtatcctcatgtatccgctcgtcctgattttaggcatcgccacctttcaaggggacacacgagtgaaaaaatatgtgctcccgatggcgattataggggcattcatttcgatcatgcattacttagagcaaaaagtgcccggttttagcggcattaagccatgtgtcagcggcgtgccgtgctcgggccaatatattaactggtttggttttattacgattccattcctggccctgattgcttttatcctgattatcatttttatgtgcctgctgaaaggcgaaaaatctgaataacaaaaaaagcgcccgcgtatgccgggcgcttttttaatttcgcaaactcatgtccatcagcaatagccgtattccctctaaatttatctttttttctcataaaaatgttattgattttacgcttgagcgattataaaatctagaggtcgtcagaaaatttaacaaacataaaagggagtcatcagaatggcttgggagctgctcagtgtgattggcatcattgcgtttgcagtcagcggcgcaattgttgcgatggaagaggaatatgatattttaggagtttatatattagggattgtcacagcttttggaggaggagcgatccgcaatttgctgatcggcgttccggtgtcagcgctatgggagcagggagcgtactttcaaatcgcgcttttatctattacaattgtgtttctgtttccgaagctgctgctgaagcattggaataagtggggcaatttatcagatgcgatcggcctcgctgcctttgctatccaaggcgcactgtatgctgtcaaaatgggccatccgcttagtgccgtgatcgtggctgcggtgctgacgggaagcgggggcggaatcatccgcgaccttcttgccgggcgcaaaccgcttgtgctgaaggcagaaatttatgcagtctgggcggctctcggcggtttaatcgtcggcttgggctggctggggaactcgttcggcttatacgttctgtttttcgtgctcgttgtttgccgggtttgttcctatatgtttaattggaagctgccaaaccgttcttttcgcttagatagtcagtaaaataaaagaaacctctccgtcatggagaggtttcttttatggtagcctgccgggatcaaataaaaagtccttttcgaatgctgacgcgcagagcaaagctattgaaaattaataggtagcccaaaaggtatagctgatggtttttttagttcctgtgttagtgaatttgaatctgtattttgttttgtagcttttagaagcttgtttgtaacttaaatttgtagagccttttttcgttgcataaaaagttttaacatttttccagcctttatttgtcttttgttgcagagttgctgtaattttcccgctgcctgatccgtttgctgtcatgttggcccaagttcctcgtcctggataataaatctgaaatgttggcgagtaagtatagtttttaaatgagcccgaatggtaatgagtactccatatttgaccttttttaacccaatctttagcttccgctttgttgtttactaggtcaattgccgtaaaacttgttacggctacgacgaatgccagcaacatcatagatagctttttcttcactgagtatttcctcctaactaattctggttctttcttcatgtttatatcataaaccgagagaaataatgtaacatcgtcctattctcccaaatgaaaaacttcaatttgttgaaatatgtcgaaattggatgaaaaatgactattttactgcgactatagatacgatagcaaggatgtagttgctttatggaagatgacaataacagccagtttagtcattcttcacgttagatgaacagacaaacacggtaaagctctgcggtgtttttaaaatgaaaaagaaatattatatcgaagattgaatggaataaggaatcgatactgatgaaagagaagattcgcaacctaagaaaagcacctccaacagtgatcaatgtgaaatcataagagaaaaaaccgatttcgagttgaaatcggttttttctgcatataaataacccaaaccttgattggtattgggtgaatgtgctaagataaattgtatttgctagtttcgtcatacattagatatatgtatccaattatattttacagtatttcatctatgtttgtcaactattttctggaggtgccgttcatgaatcagcaggataaggaatggaaggaagagcagtcgagaatagatgaggtgctgcaggagctcgaaaaaaaagagcggtttctggaaacgtctgcgggcgggttgaagcatgatatcatcggattaagaaaaagcttttgggaggatgttaaggttaattttgatgatgcccatgaagcgattgaaacgatggcaagcattaagcagcaggcagagctgctgtctgatcgggaacacaatcatcggcgcatggatcagcagctcaaacgaattcatcaattaaaaaaatcgccttatttcggccggattgattttattgaaaacggcgaggagcaggcagagcgaatttatatcggtttagcttcctgtttggatgagaaggaggaacactttctgatttatgactggagggcgccgatatcaagtttgtactacaattattccccaggaaaagcggagtacgaggtgcccggtgaaacgatagaaggggaaatggtgctgaaacgccagtttatgatcaaaaacggcactctcaaggcgatgtttaataccgatatgacgattggtgatgaaatgctgcaagaggtattaagccatcactccgatacccaaatgaaaaacatcgtgtctacgattcagaaagaacaaaatcagattatccgtaatgaaaaaagcaagatcctgatcgtgcagggagcggctggcagcgggaaaacatcggctgcgcttcagcgtgtcgcttatttgttatacaggcaccgtggcgtcattgatgccggacaaatcgttttgttttctcccaacttcttatttaacagctatgtctcctctgttttgccggagttaggagaagagaatatggagcaggcgacgtttcaggaatatatcgagcatcgtcttggccgcaggttcaaatgtgaaagcccctttgatcagctcgaatattgcctgaccgaaacaaagggaggcgattttccaacaaggcttgcgggaatcacatggaaggcgggtttatcctttcagcaattcattaatgaatacgtcacacggctttcctctgacgggatgatttttaaaaatattatattccgcggacaaaagctgatcacaaaggagcaaattcaatcctatttttactcattggatcaaaatcactccattccgaatcggatggagcaaaccgcgaagtggctgctgagtgagcttaacaagcttgagaaaaaggaacggcgaaaggattgggtcgttcatgaagctgagctgcttgacaaagaggactacttggacgtgtgcaaaaaactgcaagaaaggaaacgattcagcgagagtacgtttaacgattatcaaagagagcagcagctgcttgccgccatcattgtgaaaaaagctttcaaaccgctcaagcaggcggtcaggctccttgcatttcttgatgttacacagctgtatttgcaattgttttctggctggggaggaaaatttcagcatgagaagatggccgcgataggtgagctgacccgttcggcatttacggataataaattgctctatgaggacgcggcaccgtttctttatatgcaggatctgattgagggcagaaagaaaaatacgaagatcaaacatctatttattgacgaagcccaggactattcaccgtttcagatggcttacatgagaagcatttttccggctgccagcatgacagtgctcggtgatatcaatcagtccatctacgcgcataccatacacggggatcagcgtatggatgcgtgctttgaggatgatcctgctgagtatgttcgtttaaagagaacatacagatcaacaaggcagattgtcgagtttaccaaagcgatgcttcaagatggagcggatattgagccgtttaatagaagcggggaaatgccgctcgttgttaaaactgaaggacatgagagcctttgccaaaagctcgcgcaagaaattggccggctcaagaaaaaagggcacgaaacaatagccgtcatctgcaagactgcgcagcaatgcatacaggcgcacgcccacatgagtgaatatacagatgttcgcctgattcataaagaaaatcaaccatttcaaaagggtgtttgcgtgattccggtgtatttagcgaagggaattgaatttgacgcagtgcttgtctatgatgcatctgaagaacactatcatacagagcacgaccgcaggcttttatatactgcgtgcacccgtgcgatgcacatgctggcggtattttatacaggtgaagccagtccgtttgtaaccgctgtgccgcctcacttatatcagatggctgaatgaagagaagggagtccttctcttttttctatttacatgaagcatagccgttttatcattaggattcttaatagttatcatcatgtaaatatattttacttaagcctagtattccggtaaagttcaattagatgcaattttcgatcagtttataactttgtgaggtggatacgttgcaacttcaggtaatgaacagtccgtttaatcaggagcaggcagagctccttaaccgccttctgccgaccttgaccgaatcccagaaaatctggctgagcggatatttatccgctcaatctgtttccgcccaagaagctgcgggtgcgccggcggcagctgtgtctgcggaagcaccggcaccggccgtttcaaaagaagtgaccgttctttatggttcacagacgggaaacgcacaggggcttgcagaaaatgccggcaagcagcttgaacagagcggttttcaagtgaccgtctcatccatgagcgattttaagccgaatcagctgaagaaggtaaccaatcttttaatcgtcgtcagtactcatggagaaggcgagccgcctgataacgcgctgtcgtttcacgaatttctgcacggaagacgggcgcctaagcttgaagacctgcgcttttccgttttggcgcttggtgacagttcgtacgagtttttttgccagacagggaaagaatttgatcagcgcttagaagaactcggcggaaaacggatttctccgcgcgttgattgcgatcttgactatgatgaaccggcagccgaatggcttgagagtgtattgaagggattaaatgaagctgggggcggaagcgccgcgcctgcgtcggcggctgcgtcacaaaccggtgagtcttcgtattccagaacaaacccgtttcgggctgaagtgttagaaaatttaaatttaaacggcagaggatcaaataaagaaacacgtcatgtggagctgtctcttgaaggatctggcctgacttacgagcctggtgacagcctcggcgtctatccggaaaacgatccggaacttgtcgagctgctccttaaggaaatgaattgggacccggaagaaattgtgacgcttaataagcaaggtgatgtccgtccgctgaaagaagcgctgatttctcactatgagattaccgttctcacaaaaccgcttcttgaacaggcagcccagctgacagggaacgacgagcttagagagcttttagccccgggaaatgaggagaatgtaaaagcctatattgaagggcgcgatttgcttgatctcgtccgtgactatggcccatttagtgtatctgcgcaggagtttgtctcgattttgcgaaaaatgcctgcccgcctttattcgattgcaagcagtttatccgcaaatcctgatgaagtgcatttaacaatcggcgcagtccgctacggtgcgcacggccgtgaacgaaaaggcgtctgctcgattttgtgcgcggaacgactgcagccgggagacacacttccggtttatgtacagcacaatcaaaactttaagcttccgaaagaccctgaaacaccgattatcatggtgggccctgggacaggcgtcgcacctttccgttcctttatgcaggagcgtgaggagacgggagcggaaggaaaggcatggatgttctttggcgatcagcactttgtcacggatttcctttaccagacagagtggcagaattggctcaaagacggtgtgctgacaaaaatggatgtggcgttctcacgtgatacagaagaaaaagtatatgtgcagcaccgcatgcttgaacatagcgcagaattgtttgattggcttcaagaaggagcggctgtttacatttgcggagatgaaaagcatatggcgcatgacgtccatcacacattacttgaaattatcgaaaaagaaggcaatatgagccgcgaagaagcggaggcttatcttgccgatatgcagcagcaaaaacgctatcagcgtgatgtatattgatttgacttgaaaggagtttttcaacatggtgaccaaaattctaaaagcaccggacggctctccaagtgatgttgaacgcattaaaaaagaaagtgattatttgcgcggcacgctgaaagaagtgatgctcgatcgaatcagtgccggaattccggatgatgataaccgcctgatgaaacaccacggcagttatttgcaggatgatcgggacctccgaaatgaacgccaaaagcagaaacttgagcccgcatatcagtttatgctgcgcgtgcgtatgccagggggcgtctcgacgcctgaacaatggcttgtcatggatgacctgtcccagaaatacgggaacggcacattaaaattgacgacacgtgaaacgttccaaatgcacgggattctgaaatggaacatgaagaaaaccattcagacgatccactcagcacttttggatacgatcgcagcctgcggagacgtaaaccgtaacgtcatgtgtgcatcaaacccttatcaatctgaaatccactcagaggtatacgagtggtctaaaaaattaagtgatgatctgctgccgcggacgagagcatatcatgaaatttggcttgatgaagaaagagttgccggcacgccggaggaagaagtcgagccaatgtacggaccgctctatctgccgcggaagtttaaaatcggtattgccgttccgccgtctaatgatattgacgtcttttcacaagatctcggattcattgcgattgtcgaggatggcaagctgatcggttttaacgtggcgatcggcggcggtatgggaatgacgcatggcgatactgcgacatatccgcaattagccaaggtgatcggattctgccggcctgagcaaatgtatgacgttgctgaaaaaacgattacgattcagcgtgattacggcaaccgttctgtccgtaaaaatgcgcggttcaaatacacagttgaccgcctcggtttagaaaacgtaaaagaagaattggaaaaccgtctcggctggagcctggaagaagcgaagccgtatcatttcgatcataacggcgaccgctatggctgggtggaaggcatcgaggataaatggcatttcacgctgtttgtcgaaggcggccgtataacggattacgatgattataagctgatgactggcttgcgggaaatcgccaaagttcatacaggtgagttccggctgacagccaatcagaacttaatgattgcgaacgtttcaagcgataaaaaagaagaaatcagtgctttaattgaacaatacggactaactgacggcaagcactattcagcgcttcgccgcagctcgatggcgtgcgtcgctcttccgacctgcggattggcaatggctgaagcagaacgttatttgccgaccctgttagataagattgaagagattattgacgaaaacggccttcgtgatcaggaaatcaccattcgcatgacaggatgcccgaacggctgtgcacgtcatgcactcggtgagatcggatttatcggaaaggcgccgggcaaatataatatgtatcttggcgctgcgtttgacggaagccgtttaagcaaaatgtaccgtgaaaacatcggtgaagcagacattttaagcgagctgcgcatccttctttcccgctatgcgaaagaacgcgaggaaggcgagcatttcggtgactttgtcattcgcgcgggcattattaaagcaacaactgacggtacgaattttcatgattgagaaagaaagacgagagacagggagtagcttcctgtctcttttttctgtaatttgctcttctgcaaaaaagttcactgtgagcatatcatgagaaaaaataccctaaaaagggtactataaaagaagacaagtgtggagagaactcctgcgaaaccacatagcggatgcaaggccaccctagctcaagggcttttagacaaacagattttttggctcatcatgccgacacacaacagacgaaggaggtcatgcatttggacatatttttagttgtgctcgtattattaacgattattgcgatttctaatatcgtgaaccggtttattccgtttattccggtgccgctgattcaagtagctcttgggattcttgccgcctcatttccacagggacttcattttgaattaaacaccgaattgttttttgttctgtttatcgcgcctctgctatttaatgatggaaagaggacaccgcgggcagagctttggaatttaagggctccgattttattgcttgcactcggccttgtatttgcgactgtgattgtaggcggctacacgattcactggatgattcctgctattccgctggcagcggcctttggacttgcggccattctttcaccgactgatgtcgtcgctgtcagcgcattatcaggaagagtgaaaatgccaaaagggattcttcgcctgctggaaggtgaggggctgatgaatgacgcatcaggtctggtggcctttaagtttgcgattgcagcggcagtgactggtgcattttcattagcacaagcggctgttagctttgtctttatttctctcggaggcttgctgtgcggggttgtcatttcatttttgattattcgctttcgcctatttctgcgccgccttggcatgcaggatgtcacgatgcatatgctgattcaaattctgacgccgtttgtgatttatttggcagctgaagaaatcggcgtttcgggcattttagctgttgtggctggcggtattacccatgcggttgaacaggatcgtctggaatcaacgatgatcaagctgcaaattgtctcctcaagtacgtggaacattattttatttattttgaacggcctggtcttcgttattctcggcacgcaaatccctgatgttatttctgttatctttaacgacactgccatcagcaacatgaaggtgatcggctatatcctagtcatcacatttacgttaatgctcctgagattcctgtgggtgctgttcttctggaacggcaaatggttctttaataaagatcagaacatctataaaccgggtcttcgttcgacgctgttaatttcgatttccggtgtgcgtggagcagtaacgcttgcaggttctttttccattccgtatttcctggaggacggtacgccgtttccggaaagaaatctgattctctttttagcagccggcgttattttatgcacgcttgtcattgccaccattgtgctgccgattctgactgaaaaagaagaagaggacgaggaacgaaacaagaagctgctgacggcgagacgtaaattgatcaaaacagcccttcaaacgattaaagaggacatgaatgagacaaacaaaacggcctctcttgcggtgatagctgaatacaatgagaaaatgaaaaatcttcgttttcagcaatatacatcgtctaatcgcatcaaaaagcacgagcgaaaagtccgtgcgcaaggggttaaggcagagcaagaggcgctgatgaaaatgctggagcggggagacatcccggaagaaacagcaaatgtgctgcaagagcgatttaacgagttggaaattttgtatgcgaacccgtttaaagtcggattatcaaaaacaaggctcaagaggctgatgtattggattttcttcggtgaacataaaaagccggagatgtcgattttaaatgaagcgggattgatacgggcaacaagagtgaaaacggcaaaagcagcgatagaatatctggaaaaacataagacggatgagcataaagaagtgtttttatctgtcattacattctataagcagttaattttcaggctggagcacagccatcatgagttaaaatcaagtgcccattttgaaaatcagaagctggaagtaaagctgaaggctgtgcaggcgatcagaaatgaaattcaaacgctcttcgaagagagggaaatttcccgggacatttcccatgagcttcgccaatacattaatgatgtcgaagccgccatgcttgaaggcggcgaataaatgcagcaaaaaagctggcgttagagcgccagcttttttctatattaagggcgatgaaatgcgacagtgctgccatcccggtcgaaccagcctctgaaggcccagttgatccagccgccatcgcctttgtttgtaaaggttccgtcttcaaatacccaaatgccatacgtaatgccgtcgtaaacggctgagccgtaaaattgcacaccgttcaaatgatcttcatattcctggcttaaattaaagaccatgacattatatttttggccggatgcgtagaaggaagactccatgaggtttttcacaaagccatccctgttctgtgcggatttgatggcatcagcgatctggttggcaattccaagtacatccagattgacgtttaaacctacatcagcggcagttgttccagcagcagttgtctgcgacatcttcggagcaggattttcttcagcggaagcaaaggacaaaggggcaattgtcaaagcggcaccaagagcaagtgtcattgggatacgaatacgtttcaagttgtttcctcctttgttttcatttggttacactaaacgcataccctgctcaatgtatttgtaatctcaatattgttaaaataggaaaaaaatagtgtttgactttgcatgtgctgtgaaaaaagaagcaaaaagagggtcttaagcgtattattggtatcggctgagaggaatgtgagataatatagacgcttacatttcagtgaaagggtggatgttcaagtgccaacaagtttaaaagatactgtaaagttacataacggagttgaaatgccttggttcggtctgggtgtttttaaagtagaaaatggtaatgaagcgactgaatcagtgaaagcggcaattaaaaatggctatcgcagcattgatacagcagcgatctacaaaaatgaagaaggcgttggcatcgggattaaagaatccggtgtggcaagagaagagctcttcatcacatcaaaagtgtggaatgaagatcaaggctacgaaacaacgcttgctgcctttgaaaagagtctggaaagattgcagcttgattacttagatttatatttgatccactggcctggcaaagataaatataaagatacatggcgcgcgcttgaaaagctgtacaaagacggcaaaatccgcgcgatcggcgtcagcaacttccaagttcatcatttagaagagctgttgaaagatgctgaaatcaaaccgatggtgaaccaagttgagtttcaccctcgcttgacgcaaaaagaattaagagattactgcaaagcgcaaggcattcagctggaagcgtggtctccgctcatgcagggacagcttttggataacgaagtactgacacagattgctgaaaaacacaataaatctgtggctcaagtgattttgcgctgggatctgcagcatgaagttgtaaccattccaaaatccattaaagaacaccgtatcatcgaaaacgctgatatttttgatttcgaattgtctcaagaagacatggacaaaattgacgcattaaataaagatgagcgtgtcggcccaaatcctgatgagcttctgttttaatcaaaaaactccccgttatggggagtttttttagtgcgtttttttctgttgaatgaaaaacagcatcaaaaaggaaatgacaacaatacagacgacccacgcccaagcaagggtattgttgccggaatccaatgcgacatatatcgccgtcggcagtgtttgcgtaacaccggggatgtttcctgcaaacatgagtgttgcgccaaattctccgagcgcccgtgcaaggctgaggatgcttccggtcagtaacgaaggataggcaagcgggacggagatatggataaacactttccatctgctagcgccgtctaccattgccgcaccttgtatatcgggatcaatgtcagcaaatccggttttggctgattgatacataagcggaaaggctacaacagccgaggcgatcacagcggcccaccaggtgaaaataacaggctgctggaaaatccactcgatggcttgtccgatgaagctgtgctttccgaaaatgacgatcaaaataaaaccgacaacagtaggcggaagaacgagcggaagcataaaacatgtttcgagtgccgtttttccgaaaaatgatgcccgtgacatccatgctccagcaagtgttccgagaataatgacaacaattccggcaactgccgccacctgaaaggaaagcacaacgggtgtgaaaaattctgaagcgcttatgctactcggcagtaaagccatatttctcaaatactttcattgcttcatcagattgcaggtattcgtaaaattccttcgcttccttacggtgttttgtatcttttacgattcctaacggatagacaattgggctgtgtgtatctgcttttgcctcgtcgataatgttgacctttttcgagaccagggcatctgttttataaacaatacctgcgtctacattgccggtttcaacataagaaagaacttggcgaacgtcttttccatacacaattttatccttcactttgtcccataaagacagctttgtcagtgattctttcccataagctcctgccggtacggattccggagtgccaagggcgattttttctgattcagccagattgctgaagcttgtcacaggtgaatctccgtttttcggtacgaccagcacaatttcattaccgaccaaatcagtgctgtctttttttgcgatatctccatcatccaccagctttttaaatttatcctcagcagctgagaagaacagatctgctcctgctccttgagaaatctgtttttgcaaggcgccggatgagccatagttatcttggatggtaatattttgatgctctttttcataatttttttggatttcctcaagtgcatcctgcgcgctggcggcagctgagatggttaacgttacttttttctcgctgtccgttgaagactggtttgaagaacagcctgctgcaaggagaaaggcagttaaggctgcgatgaaaatagaatacttcttaaacatgattgcaccccttatcattagatataactaattataactgattatgtttggtttatgtgggtttttttacattcggcgaaaaggtataataaaataggagagtgatgatgatgaatgaaacctcttcctatacgatagaagaagttgcaggtctgctgaaggtatcaaagctgaccgtttatgatttgattaaaaaaggcgtgctgcctgcttatcgtgtcggaaggcagatgcgtgtggatgaagaagatttaaagcaatataaaacgaatatgagaatgtctcagcccatcgctgcaacagaagcgccgaaacaggtgcaggaggctgagccggacggcagaccgaatgtcatgatcagcggacaggacatttcgatggatcttctcagcaagcatttggagaatgccattcaggagacgccgctccgtaaatacaaaggaagcttaaacagcctgattgatatgtatcaaggcaagtgtgacattgtcagcctccatttgtacgatgctgaaacgggccagtataacgctccttatgtaaaacggattttgacaggtgaaccgttttgtctcatcaatgtcgttctccgcaaagcaggactgtatgtgaaaaaagggaatccgaaaaacattcaaggctggaaagacttgaaaagagccgatatccggatcatcaacagggaaaagggttctggcgcaagggtgctccttgatgaacagcttggcttgcttggtgtgaatccggctgatgtaaagggatacggcgatatcgtgaccgatcattacgctgccgcttcacaagtttcaagcggacaggctgacgcgggaatcggggcgcagcacgcggcacatatgggcagtgttgattttatcccgctcatcgacgaacaatatgatatcgttgttttgaaaaaacatgagcagctgctgaaagccgtgaaggagattttgaattctgaggaatacaaggcgaatttgtctcatttaaacggctatgaaacgaagctgactggcaaggtgatgttggaaacgtaaaaaatccctcttgatagagggattttttcattcggaaaacctgagcaggtcaccatttaaaattttatcagagagagaaagttcttcgtttgctttctccttgtaagggaggcacgcatcctgatcttccagcacttcacctgttttttggctatagcacgtgttctttgtgtatatataatcgttcgtaataaagctgccgtttcgcagaacggcgaatggggtgcggtcgcccgacagcaaatcattgccgaattggatatcgccttttgtctcaacgccgagcaaatgcatcagcgtcggcctgacgtcgacctgtcccccggcatcagggatggtttccggctgttgatcggtgattcccgggatatgtatgataaacggcacccgctggagctgaacgttgtcatacggtgtgatttcgtctttccttaaaaactcagccatggcctcgttatgggcttcagaaatgccgtaatgatctcccataaatacgatcatcgaattttcgtataagccttcgtccttcagttttttgataaaatgcttcaatgcctcatcctcatagcgaaccgtggtcacatagcggtttaacagatcactgcttgaatcgaattcatctatcagctgatccttttcatcaatctcaaacggaaaatgattcgttaacgtgataaaactgctgtagaacggctgcggcaggcttttcagcttttcggcggactgctctaaaaattctttgtcttttaaaccccagcttgtcgatgtcccgggagtgacatgaaaatcatcaacatcaaaaaagcggtcaatgccaaatgtatcgtacatgacatctctgttccaaaatgttttatggttagcatgaaagacggctgaataataatcgtgctgcttcagcgatttatacatcgtatgaaattgatggtcgcttttcgtgaaaaagacggcgccgctaagggaaggatacagtgagttagcgacgataaattctgaatctgatgttttgccttgttctgtttgctgatagaaatgatcaaaggaatagctttttttaatgagatcattcataaatggggtaatttcttttccatttactttttcattcagaacaaagctttgggtcgattcaagtgttacaaagatgacattgcgcccctttgcaagaccgaatttgctttgatcaggcttgctgtaatcagcctctgtgtagtttttaatggcagttatactgtcttcatcggcaaaagctttcgcgctgatattaacagtctgagaaattgtatcgtaaatatggaactgaaacaggccgatgcttttgactagcatttcccggtcaaaagaatgtgccaaaagcttcggctgctgtacttctgcaagtgccagtgtgcataaaagcatgccgcaggaagctgcatagtaccgtttgatcgtgcggggagcggcttttgtctgtgggtgtttggtttttctggcgaacagcagcagaaaaaccaaatccacaaacagggcgataaacagaggatggaacaattcttttacactgcttcccatatcgctcatgttgctcgcctgaaataaaaccggaatggtaataaaatcgatataaaagccgtaaaaaatcgtattagagatcaagataacagtcagaaccaaattggcaatcagcaaaaaagcccgctgcttgtttcctttcagaagcaggccgatcccgaataaaggaagaataaagctgagcgggttgaccagcagcattagctcctccaacagagtatcgatttgcaaatcaaagccgagtttatatatcacatacgttttgatccacataaataagatcgaaaaacataaaaaccgctgattgtgaaaaaaggttcctttcatcaatatgactcctcacgttttcttgatcatctgcatgaaatgcttcttaagtaaaacctactaaaaacagccggttcagacaagtctcagcactcatgtttaaaacatgcgcccatgaaacagcatataaaagtagtaacatgaagcaagggtcaggccggctagcacgagctgctcagaaaaactgcctgtcttcatatataatggaagccgaacgcggatcgttgaagggaataataatttgattccgttcaccgtccaagcgtcaagaatcaagtggctcgccattccgatcatcagaccggctgatatgtttttatctggaatgtatgtagaagtgataaaaaacatgatgagcataaacagcaagctgtgtgtaaatgtgcgatggccaaaaacggagctgaccactttcgataaaataggaaattttctcccgattttgctttgtgtgtggcagatatcgggtattaatgctccaaccgcgcctgacgcagccataagcactggatcaaatccataataataagccgctgccgtacaagaagcgatgcctcccatgatgtgtgtttttcctgtcatttgccgcttctccttttatcttttgcaaaaaatctctgaattacaaatatatcaagagaatgtatgtttgatcaacaggactttggacgataaaaaatatcccgcataatttttcaggaaagaggtatcttaaacatgtacctattttttaaaagaggtgatacgaatggttttctttaataaagataaaggaaaacgttccgaaaaagaaaaaaacgtaatccaaggagctcttgaagatgctggttcagctctaaaagatgatccgcttcaagaagctgtgcaaaaaaagaaaaataatcgataaccacatgcggatagggcttggctctatccgtattttccatctgttccctttgacagatcatcctttctttgataaccttctgggagtaactgaataattaaatcctcactctttctcagtgaggtagaggttgcgcggatgatgagtcacacatgctaggctgacaggggctgttaaacatgtgtaaaaggcatcagcgccgaagtgtggagaaagccgatccttctctatgctgggactgtatctgaataagtgcaggactgccgcgtgctttttcgcggagggctatccggagatcaagggtgtgtgtttctttaagcatggacttttgttcaggctttttttgcgtttatatgatctcggggtctggtccgtacaaagaatcatggaggtactggaatggaacagacaaaaaaatggggtttttggttattaacggcgtttgtcgttggaaatatggttggatcaggaattttctccttgccgagctcgcttgcttcaattgcgagtccgtttggagctacgtccgcctggcttttgacaggtgccggcgtgctgatgattgcacttgtgttcggacatttgtccattcgcaagcctgaactgacagcgggaccgcaaagttatgcaagagcgctgttttctgacccgaaaaaaggcaacgctgccggtttcacaatggtgtggggctactgggtggcgagctggatcagtaacgtggcgatcatcacaagtctcgccggttacttgacttcgttcttcccgatcttggttgataaacgtgagatgttttcgatcggcgggcaagaggtgacactcggccaattactgacgtttgccgtatgtacgatcttgttatggggaacgcacgcgattcttgttgccagcattaacggcgcaagtaaactaaactttgtcacaacgctttctaaagtattaggttttgtcttctttatcgttgccggtttgtttgtgtttcaaacggcattattcggtcatttttatttcccggttcaaggagaaaacggcacaagcattggaattggcggccaggttcataacgccgcgatttctacactgtgggcgtttgtcggaattgaatccgcagtgatcctgtccggccgtgcgcgctctcagcgtgatgtgaaacgtgcgacaattaccggcttgctgattgccttgagcatatatattattgtgactttaattacgatgggtgttctgccgcatgataagcttgtcggctctgaaaaaccatttgttgatgtactctatgcgattgttggaaacgcgggaagcgtgattatggcgcttttggctatcctttgtttattcggaacgatgctcggctggattttgcttggctctgaggtgccataccaagcagctaaagcaggagatttcccggcattttttgcaaaaacgaataaaaagggaagtccggtcattgcactcattattacaaacgtcatgtcacaggtcttcattttctcggttatttcccggacaataagtgacgcatttacatttttaacgacagcggctacacttgcatatttaattccgtatcttgtatctgcaatctacagcttgaaggtagtcatcaaaggtgaaacgtatgaccagctgaaaggctcccgtgtaagagacggattgatcgcgatactggcgtgtgcatactccgtgtttgttatcgtaacaggcacagcagatttaacgacatttatcctcggcatcggtttattctttgtcggcttaatcgtttatccatttgtgagtaaaaagttccagaaagaaaaacatgcataatgaaaagatacctgatttgctcaggtgtcttttttataaaatcacaatttctcctgttacgaatccgttcgttaaatatgcaaaaaacgtttttcagtctctccagcataaaaaaactgatcgtgatgaggatgcagcttaatatgaatggctcaaagaaaatatccgatatgattcaaatcgagccgttccttataaatcagcaaaagagccgcgggcaggcggctcttttgtttatttagtcaagctttcggtaataaacttcagttgtccttctaatgaaatcgggtcagagaaatagaaaccgatcggatccattttgtagacatggtcatttttaacggcattcaggttcttccaaatggagctttcaaaaacgccgccatcatcaccgcctgattgccatgggcccgcgaaaatgtaatccccggcaaagtcagggagcttctctaatgaaatacttgtataacctggcccctggtcaatggctttttcttttgtcagctttgtagcctgcaggccaaggtctttgtaaatgatgcttccgcctcttccaaagtctttaccgaatacgtaaatgtcttttccgttcgtttgcataatggaaatggttttgtcaccgaccgcttttttgatttttgttttagcggcagcaacttttttatcccactcggccagccatttttcagctttatcttcagttcccgtcatttttgcaaattctttcagctgttcgatgttgtcgagcttatcgtattttactgcgacagtcggcgcaattttttcaagctttttaatatcagcgccctgtgttgtccagacgataatcaggtcagggttcaaatcaatgaccttttcaaccgaagtgccgtctccgatgttttcaacgccatcggtttttcctttgtagtaagggtttttaaatacattctcaggcgcaccgacaacgttgatgccgagtgttttgaagtagccgtaatagccgtctgccatgacaaccacccgtttaggatgcttcgggatttttacatttccgttttcagccttgtatgtaaaggtttctgcgccttttgaatcagaggcagaacctttgctttctgagttattcccgcaggctgccagcgctgcaatcaataacagggcaaaaaacgcggctccgagtttcttgtatatatgggtcatatctcataccttctttctaaaaaatagatgaaaaagagaatcattatcatctgtgattataccactgcaagtgccggttgacacgatatttttgcaaatgcattttcatttttgttcaaaacactctattaaatcagctgaaaaaagtgatatactgaaacagcaattgataatcattatcagtaacagaaaggaagtacggcagttgagtcaacataaaaatatacagactgcatcagaagaaatccaatggacgtcaaggacatatggcgcggtcatcgtccttattgcaggtctatgcctgctttgccttggcgcatttttatccatatccctcggtgcagcagatattcatttgcgcactgtatgggacgccatttttcattatcagccgacaaagacatctcaccaaattatacatgatcttcgactgccgagaacggcggctgccgcgcttgtaggcgcattgttggcagtgtcgggagcaatcatgcaggggatgacgagaaaccctttggcagagccttcgattatgggtgtgacatcaggctctgcgtttgcggtttcgattgcgtttgccttttttcccggactttctgcaatggggcttgtgctatggtcctttgcgggagcggggctgggggcatcgacggtaatgggcatcggcttgttttcaaggggcggacttacgcctgtaaagcttgctctggcgggtacggcagttacttatttctttaccggcatttcaactgccattgcaattcgctttgatgtcgctcaggatatcagcttttggtacgcaggcggggtagcgggtgtgaaatggccgggggtccagcttttgtttattgcaggggctgtcggtttaacgcttgcgtttttcatcgcccggtctgtgacagtgttgagtctcggtgacgatctggcaaaagggcttggacaatatacatcagcagtgaaactggtgggcatgcttattgtagtaattctgaccggagctgcggtttccattgccggcaccattgcatttatcgggctgattattccgcatattacccgttttttggtcggtgtggattatcggtggatcattccttgctcggcggtgctcggtgctgttttgcttgtttttgctgacatagcggccagactcgtaaatgcgccctttgagacgcctgtcggcgcgctgacttctctgatcggcgttccctttttcttttatttggcacgtcgtgaaaggagagggctgtaatgaaaacaaaaacaaacaaaccgcttattgtaatggctgtgacctttttgcttatcgtggtggtcttttttatcagtctcaatttgggcgttatcaaaattgcaccgcttaaaacgcttcaggtctttttcggccaaggaacggcgcgtgatgaacttgtcttatttgagttcaggctgcctcggatcatcctttctttgcttgttggagcagggatctccgtagctggagccattttgcaaagcgtgtctcaaaatgaacttgccgagcctggtattctcggaattaacgccggcggttcacttgctgtagtgctttttatatacttttttcaagggtcagcttcagatctcagctttttcggaacatttatgctgccattcagtgctttggcaggagcaatcctcgctgcgtttctcatttatattctggcatggaaaaaaggcgtgacaccgattcggctgattttagtcggcataggggtgaatgccggattcaatgccctgttgctgatttttcagcttaagatggaccctcatgattttatgcaagccgcggtttggatatccggctcaatatggggggcgaactggaatatgatctgggcgattctcccttggattgtgatcttgcttctgtttactttatataaggcacgctatttgaacattatgcagctcggagaccaattggcgaccgggctgggcaccgctgttgaaaaggaaagacggattcttcttctggcagcggtcactcttgccgcttcatgcgtggcagctgcggggggcattgcgtttctcggattgatcgcgccgcatgtggctagaaggctgaccggtccacgtcaccagacgctgataccggtctccgccttcatcggctcattcctgtttttgcttgctgatacgctggcgagaaatgtattggcaccatcagaaattccggtcggacttgtcatttccgtgctaggtgcgccttactttatttatttattgatgaaagcgaattagaggagggggccgaatatgaattcattatcaacggaacagcttggaatcggttatggcgacagggtgattgtagaggatttaaatatatcgattcctaaagggaaaattaccaccttaattggcccgaacggctgcgggaaatcaacgattttaaaaacaatgtccagaattatgcgttcacatgcaggtgccgtctatttaaacggcaaagcgattcataaaatgtctacaaaggacattgcgaaagatatggcgattcttccacagacacctgaagcgccgagcggcctaacagtgcacgaattggtgtcgtacggcaggtttccgcatcaatcaggattcggcagattaaatgacgaagaccgccggattatcaaatgggcgcttgaagaaacaggcatggctgaatatgctgaacggccgattgaggcattgtcaggcggacagcgtcaacgcgtgtggattgccatggcgcttgcgcaagggacggaactgcttctgctggatgaacctacaacgtatcttgatcttgcacatcagcttgaaattctgcagctgcttgacagactcaacaaagagcaagggcggacgattttaatggtcattcatgaccttaaccatgcagctcgtttttctcattatatgatcgcgctcaaaaaaggcacggtcatcaaggaaggaattgcactggaggtcatgacaccggacattttgaagcaggtatttcagattgatgccgaaatcgtgactgatccccgtacaaataaacctgtatgcttgacatatgacttgattaaaaatgaaaaagagctagttactgtatgaaaaaatcccggtttgaagccgggattttttttattcggctttgaaaatacaatttttctatttgattccgtcatttcaataaaaggattgcaagtctttttgaattaatagataatattggttagaatgtttcgaaaatattacatagtttacagaaagaggagatcgttgtgtccaagaagaaaaaatggcttattggcggtgcgatatgtgccggtgtgcttgtattggctgggatcggcgctggcggtttttacttttttacccacatgaaccaagttgccgtatcatcggagccctatgctgaatcggtcgcggtatacatgggaggagattcagaatcaggccaaacgttttctggaaaggttgaacctgagaaacagcagaaagtatacatagattcagaaaaaggcagcattaaaaaaacatacgtcaaagaaggcgatcaggttaaaaagggcgataagctttttgagtatgagggcgaggatcattctgatgaagtggagcaagcaaatttgcaaattgaaatgacaaatctgcaaatcaaccgtttgcaaaaatcaataacggaaacggaaaagaagctgaaagcggcaggaaaagaagagaaaacccagcttcaagatgaacttgatcaggccaatttcgatttaaaaacaagccagcttgaactgaagcagcatcaaaaagaactggctggcctgacgaaaaacaaaggttccaatgtcattacaagcaagcatgacggaatcgttcaaagcgtcaatcaggatatcgctgacggtgcaacaggcgaccaggcaacgggcccgtatatccagattgtttcgacgggcaaatatctggtcaaaagccaaatcaatgagctgttaatggacacgatcaaaaaaggcagcaaagtcagggtcacgctgaaaacaggcggtgagggcgagtggaaaggaaaggtcacctcgatcggcaagcttccagcgggagcaggcgagggtgaagaatcagaaagctttgctgatgaagaaatgaatccccagtcctctaactatcctttcaccattttattagacagccataaaggtcttgaagtcggctatcatgtcaacatcgaagtgatgagtgataatgctgatgcggatacgatcaagctgccgtccgacatggtcattcaggatgtcggcgaaccgtatgtgtggaaagctgatgagaatcacaaagcggttaagcagcctgttgaaatcggagagactgatgaaaatgacatggtggaaattaagagcggcctgacgccggaagattatgtgatctatcctgatcccgcggtcaaggaaggaaagcaggttacagtcaatgctgacactgaataatatttcgaagtcatacaagctgggaaaagaagaagttccaatcttgaaacatatcaatctgactgttcaggcgggggagtttttagctattatggggccttcaggttctggaaaatcaacgttaatgaatattatcggctgtttggacaggccaacctcaggaacctatatgcttgaccagatcgatatattgaaagggaaagacggggctttagccgaaattcgcaatgaatcaatcgggtttgtgtttcaaactttccatttgctgccgcgtctcaccgcgctgcaaaatgtcgaactgccgatgatctacaataaagtgaagaaaaaagagagaaggcaacgggcatatgaagcgctggaaaaggtcggattaaaagacagggtctcctacaaaccgcctaagctgtccggcggccaaaagcagcgggtggcgatagcgagggcccttgtcaatcagccgcggtttattttagctgatgaaccgaccggggcccttgataccaaatcaagtgaacaaattttgtcactgttttctgaactgcatcgggaaggcaagaccattattatgataacccacgacccggacgtcgccaaaaaagctgacagaaccgtttttatcagagacggagagctggtattagatgagagaggggatatcagccatgcttgaacatattcgaatctcctttcagtccattttctctcataaattaagatccattctgacaatgctcggcgtgattatcggcatagcggcaatcatcgcgattgtttcaatgctgaagggccaaagtgagcaattaaagcaaagtatgatcggcatgggaaacaacgccatcaatgttgtctaccagccgtctgacggagaagaggagagcggcggccctcaggtgtcgtatgcgtccgcgccgcctgtagcggaagaaacagtaaaggcgatcaaatcagatccgatggtcaaaggattatccttatattacttgtcagaaggcgcgagcgtttttcatttaacaaacgtttcgtatccccaagtgtatggagtggacgttgattacttcgacatgtttccaatccgaataaccgaagggagaaagctgacggaaaatgatttaaacagcacacaccaagtggtgatgatcaatgaagctgtcagagatgaactgtttccggacggagaagctctgcataaaagcattgagatgaatggtgtgccgtttaaggtcgtcggtgtttttaaagaaaaaaatcaacaggaaagcatgtttgaaggcgactacgcgaacccggttttgtacgtgccgaaaaaagtgtggccgcttattgaagggtttgacgcaccaacgcagattgccgtgcaggctgattcttctgagcatatccaagaagcgggtgtaatggctgcagatcttttaaatcagggactgtcagaagctgagctggaaaaagcagagtacagtgtaatggatcttcaggagatcgcgcaggaagtggagtcctttaatcagtcatttgcattgctgcttggcggaatcgccagtatttcacttttggtgggcggtatcggcgtcatgaacattatgctcgtttccgtaacggagcgcacgagggaaatcggaattaagaaagcgctcggtgctaagcggcgtgtgattttatttcaatttttaaccgaggctgttgtgctgacaagcattggcggaatactcggtgtgctggcgggcttcggcatcgccaagctgctgacggtcatttttccgatgccttttatcgtctccattccagctgttgtcggagcactcatcttttcaatggcagtcggcattatcttcggcttgcttccgtctatcaaggcttcgaagcttcagcctgtagacgcgcttcgctatgaataaaaagaacgcatccaattggaatgcgttctttttttagctgggaagagccgagttgcatttgtctaaaatcaaaaaaacggctgcgacaatcatttcttctgtggtggacagccaaatgtcgctgatcaattggtctgttgtatgagcagtcatccacaaaaacagcagctgtacgatgccggcaaggagaatgaatagacgttttcctgtcttgaaaaatgtaaagctatgtatcatcagcctttcaaatggttcaaagcataatccgagaacaaggaataccacggcaaaaagcaggacatgagctgctgagcggtagctcgttcccgctaaagaaaacaatatatagatgacagcaaaataggtcaacaccactgctgctgctgccagcaagtactttatggagagccgcaataagcgttttgaagggttttgatgtttcactggttcagctccttatgaaggcttgcagagaacgagtgctctctgcaagccgcaagtcttttatttactgcatttctttttcactactgggtgcttttcttttgaaagcacatcagtaaagtctttgcccaagtcaaggtgcgcttgaacaaatgtttcaggaagcatggcaagccattggtttaaagatacatcagcataatggtcgtctttgaagatttctaaaaagacaagcggttcatccccgatgttttcaacgtaatgacccattgcaaatggtacatacccgacatcaccggcttggtaattaaacgttctggcatggccgtcagatgcaaaaacggtcatcctagctttaccggagatgtagtattgccattcgtgtgtattcggatgccagtgcagttccctcatggcgccgggttctactgttacgagcgctgatgcgatggttttagacactttgaagtttgtcgaatctgcaatgtatacttttcctccctcagattcgatcggctcttgttcaagaaggcggtaagtaaatggataaggcacttcgccattcggcccttccacaatatcatcttttaaactgccaggaagttggttttcaaatatatatttttctttgccaggcaaattggcaatctcttcttttgtcacgccgaagttcgcagcaatgacttcttttggagtgtgggcaagccaatctgtcagctggaacgtgctgttttcagagaatgatccatcgtcaaacacgagcaggaactcagctccctcatccagcgcttggatggagtgcggcaagcctgacgggaagtaccaaaggtctccttcacctacatcgtcaataaagctgcgccctttttcatctacaattgtgactcttgcacttccgtaaatcatataagcccattcagcttctttatgccagtgaagctcgcgaatcgcgcctggcttcagccgcatatttacggatgcaaggttttctgaaatcggcaattcacgtactgtcacttcacgggcatatccgcctttttctaatcggttatgagtatcagagaacgaaaacttcatattgctgacggtgccatgatcggtttcaggcggaacgagcatatcagggttttgccggtctctttcaatattgcgcgggatttttaccgttgctcctttgtctcctctaattggctgcggaatgtcattttgttttttcatgaaatgtttcctccttacatttaaatgtgatagcagaaagagaaggtgaaaggcctttcgttttcccttctgttttgttaagtgaaaaaaaacagtgaaaagtcaacttcgattgaaaaattatttttttgcatgatctttcagttctgtcattagttctattagttgatcaaacttcttttcgaatcgggtcagcagatacattgcaatcagcgcgggaaaccccaaattgccgatctgttttacgacttcctctataaaaacctgatccataggaaaatacctcccttctttttctgcagtcatgtatgtaagtgaaggaaatccgataaaacgtaaactgctgcaaagtattttggaagacactagtcggaaagtagtagtttacttttttttgctttccttcatttaatttagtagggaggcggtttgatggactatcaaagtcttttacggtcaaaatgtaaggagataatgaagcatcccatcgtgaagcattttttgagcaatcctcagcattaccgtttgttcaaaaacgtaatggaaagccctaacgaaaaagatgcaaaatcattggacgagctatttaagcagttttataaagaaatccgcatcgtcaagtatatgaattcaatgattcgcatcttttctattgattttgataagcgggttcgcaaaaaccaaaaacggtatccgctgacggttgatcatccggaggcgggagatcggcttccttccgaaacaggaagcgatgcatttgaagaatttttagacaggcaggatgatttgagccagcatgtccaggattatcagctctaccaagcgattcagaagctgactgacaaacaaaaaagtgtgctgacgaaagtgtatcttcacggtgccacgatgcaggagattgcagattcattaggggagtcccgacaaaacatttccaacattcataaaaaggggctggagaatatcagaaagcagctagcggcgcaaaaaaagggggaaaagtaagctgtgaacggccagtttgaacaaaaaaagaaacaaaaagacgagacttatgacattgagcacctgattgcatgcttttcaccgatgatcagaaaaaaactcagcaatacgtcctatcaagaaagagaagatttagagcaagagctgaagatcaaaatgtttgaaaaggctgatatgcttttgtgtcaggatgtcccggggttttgggagtttattttgtacatggtggatgagaactcataatattttcatatgaaaaaacatcaaaagggagcgcttgtttgctccttttttgctgttttgatttgccaagctccaatgtattcaaaaatgtaccataaataaacgatataatgataagatgaaaaaaacagtgacagaaaggaacataaaagtggaaaatgcgtcaattttaatcgtagacgatgagaaagcgattgtggacatgatcaaacgcgttctcgaaaaagaaggttatcgaaatatactggatgcggcaagcgcagaagaagcgattcccgttgtgaaggccaataaggttgacttgattgtgctggatgtcatgatgggcggaatgtccggttttgaagcctgcacacttatcagagagtattcagacgctccgatttttttcctgacggcaagatcatccgacgcggacaaattatcgggctttgcggttggagctgatgactatatcacaaaaccatttaatccgctggaattagcggcgcggatcagagcgcatctcaagcgtacatatcaatcaaaagaaacaagttcaaatcaaacctacacatatgattattttactttttctccgcaaaatgccgagctgatcgtaggcggggaagccgttgcctgttcagcccagcttctgcagcttttgcagtatttttgtgaacaccctaacgtggtgctttccaaagatcaaatatatgaaaaagtatggggctatccttcctacggtgacaacaacaccgtcatggttcatattcgcaagcttagggagaagattgagcgcgatccgagcaatccggagtatattgtaaccgttcgaggtctcggctatcgttttatcccaaatcctgaaggcaagcggtcatgaggttaagatggaagtttttgtttcactttttcggccagatgctgattgtgatcctgctgcttacggttatgcttgttgcgtcgtttttctatttagacgctcgttttagcgatgcggaatccaattcagggctgacgaaggcaacgaccgacacacttgaggcatatctcgatgtaaacgaagacgggacatgggaagtggataatttcctgaagaaatctgttgataaacagcacggctggatgcaaatcattgattcggaaggaaacactgattattcctacagcgtgccaaaagacgtgcctggcacctataccaagaaagagcttttgtctatttataaaaccaaaaagcttcataactataaactgaattattgggccatcaatattgaagataagtcgtatcttctattgtccggctggaaatcaaaaagtgaacagctcctgacttccgttgaaaagcgcgaacaaaagatagactcactagcgcactataagtccagtaccatcgactatattaaacggaaaaaaggcgccatttacctgttagacagcaatggaaagattctcgacagcatcaacagcacaaaaagcgaaagaaaaacgatgaaccagctggagctgcttaaatacagctctaagccttggaactataagcgggaaatttccgttaagatcctcaataaagacagatggatggtcgctacggtgccgaaccctgtctatgtaaccgatcaggagtttaacaaatcattcctgaaggttgtattaaaagcgatgtttctcgtgatggccgttttgttcatgtatatcatttggatgaccgtttggtatatgttccgattcgggctgccgatttttcacacgattagatggctggtcaatctgtcaaaagggaagcttgaggagcccagaaaccgggaaggccgtcctgtcagcaaaaataaaaagggaaaaatcaaacagccgtaccgcttcttcggtgagatatttgaatcaatggatcagctgactgaaacgctgagaagggataaaagaaacagagaaaaaatccaggcgacaagggaagaatggattgccggtttgtcacatgacttaaaaacaccgctcagcagcatttacggctacagcatgatgcttgagtcgaagcagtatgactggtcgccggaagaagtgaaagaaatggggcaggttgtcagagaaaaatctgaatacatgtccaagctgattgaagatttaaatttaacgtatcggctgaaaaatgatgctcttcctattgagagaaagctcactagccttatcccgttttttaaaaatgtcattgaggattttaagaagaatccgttttctgaaggctatgatatctcgtttgtatccaaagaagagcatattgaatttgcccttgatgaagcgtggttcaggcgcatattagaaaacctccttgggaatgccgtgaagcacaacggcaaaggaacagagattcaagtcattctggagcaaacaaaaaatcatatttctttaaaggtgaaggacaatgggaaaggaatggatgaagaaaccattacccatttgtttaaccgttactacagagggacgaacacaaaagattcaactgccggaacgggtctcgggctcgcgattgccaaggagcttgtccatctccataacggaacgatccatgtgaacagcagaatgaacattggaacggtcattaccatcctttttaaaaaacaataaacatcaagtggtttggacacctctttgccgggaataacaatatatagactgaagctaaagaggtgtaacacatggatgcagtattggaagcagacactcgggcagtgattggagaaggcccgttatgggatgaagaaaacggccgcttatattgggttgatatcctggggagcgagctccacatctttgaccctgaagaaaaaatcaaccgatcaatcaaattcaaatcctttgtgacggcgcttgcgaaatattcaaaggatgaactgattatgacgatgaaggacgggttttacctgtatcatcttcgggatgacagcttggaaaaaattaaacagccgaaggacatgcatgagagcctgagatttaatgatgctaaatgtgacccgtacggaaggctttgggcggggacgacgagcatggaaggcgagcaaaaacaggcgtcgctgtaccgtttgaatctagacggcagtcttgtcaaaatcaaggatcaagtctccacctcaaacggtttggattgggaccgtgagcggaatttgatgtattacatcgacacgccgacgcaggagattgtgcgttacagctatgatcctcaaagcggagatgtttcgaatccagaacctgtctatcgttttgatcagtcagacggattgccggacggcatgacaattgaccaaaatggcatgctgtgggtggcgctgtttggcggaagccgcgttgttcacattgacccgtttcagaaaaaagaaatcaattcaatcagcgtgccggctaaatatgtcacgtgctgcgcgttcggcggcagagacttaaaaaccctttacattacaacggcaacagaacaaatgacagaaaaagagagatacgagcagcctcacgctggagggttgttttcagcacaactggaaacaggcggatatcagccggtaccatttgctggagacgtataaaaaaacgcatccgaaacacggatgcgtttttttatactacagagaacggataatgccgccttccacacgctgtgccgtgccgttaatggcggatgcggcgtcagacgcgaggaatacgattgtgttagcgacttcttctgctgtcgcgtatcgctgaataagcgaggttggctcattgaccttgaaatagtctttgataaatgtatctgtatcctggccggctgcttgtgcggcgccttccatataggatgccacgccctcagtccaagtaggtcccgggagcactgagttgaccgtcacatttgtgccttttgtcatttcagccattcctcttgaaaggctgatcagcgccgtttttgtcattgagtatggaatcatcgttggcagcggtttgacgcctgcttcacttgcaatatttaaaatgcggccgctgtttttggcaagcatttttggaaggaagtgacggcttgtccgaacggcgctcatcacgttcacttcgaaatattgattccactcttcatctgtcacatcggcaaagtcttttacctcgaagaaaccaaggttgttgacaaggatatcgatatcaccgatttcatttactttttcaataaaagccgctgcttcatctgtttttgacaaatcggcagcagcaccgtgcactgttccatagccagaaagctcttcaatcgtgcgatcgacagtctcctgtttgcgtccgttgacaatgactgccgcaccctcttgcagaaagctttttgcggcggctttcccgatgccggacgtcgagccggtgattaagacgagtttgtcttttagctgtaaatccataagaatcattccttttgattgatgatggtattaagtatacaagatcaaatttagtgtttacgaggattttgctcccatacacaatacggggaaaagtcattcaggacgcatatacaagcctgtcagtcatatagtataattactccgaaaaaaggatacgaatgtcaaataggtgccggtccgtgaacaacagccggcttaaaagggaaaccggtaaaagccggtgcggtcccgccactgtaattggccaagcgccaagagccaggatacctgcctgtttgatcagcacgaattctgcgaggacagatgatgtgtaaacaataggcttttttgtgttgtttacagcatctttaccgtcgtagagatgcttttttagttcgtttaggaggaaaagattatgaaaagacgagccgggatatggactgcgctcctgttggctgctgttatgctggcaggctgcggcaatcctgcggatcagaaggattcaaagacaaaacaaaaaacagaagcgtttcctgtcaccattgatgatgcgtcaaaccaagatgtaaccatcaaaaaagagccaaaaaagattgtttcattaatgccgagcaacacagaaattacatacgcacttggccttggtgacaaagtggtcggtgtcaccacaaacgatacctatccaaaggaagtcaaaaaggttgagaaagtcggagatatgaatgtaaacgttgaaaaagtcatttctctaaaaccagatctcgttctggcccatgagtcttccatgtcagcatcagcggatgccatcaaacagctgaaggacgcgggcattacagtgctgactgtcaatgatgcacaatcattctccgaggtgtacaaatcaatcgaaatgatcggagaagctgccggggcggagaaaaaagctgatcagctcgtgaaaagcatgaaatcagatctaaaggatattcaagaaaaagcgaaaaccatttcaaaggacgaggagaaaagcgtatttatcgaggtttctcctgatcctgatatttatacaaccggaaaagatacgtttatgaatgaaatgctgaatatcatccatgctaaaaacgcagctgcggatcagacaggatgggtgcaaatgacagacgaggcgatcgtaaaactcaatcctgatgcaattgttacaacggacggtgtgaaagcgaaagctgtggaaaaacgcgatggctggagcgaaatcaatgctgtgaaacatcatcgtgtatatgatgtggaccctgatcttgtgacacgttccggtccccgtctgatcgaaggggtcgaagaacttgcggaaagcatttacccggatacgtttaaggaataatcgttatgccgcatatatcattggtttctcatttttagccgtgagcatcatcctaggaatttcttgcggcagcctgcatattcctattcccgctgtttttcgtgtcttttggcatcaaggtttcggcggctctatcggttctgatgatccgatgtacactaatattatgatgaatatcagactgccgagagttgtgctggccgcccttgtgggggcggctctttctattgcaggggccgcttttcaaggattgttgaaaaatccgcttgctgatccctatacgctaggtgtgtcatccggtgcttcagtcggagctgttgtgactctgttcttaggtttgcaccttcctgtcatcggagggtttacactcccggttttgagtgtagccgcggcactggccacgatggcggcggtccttttcttcagccgcctcgttcatgcttcgatgtctgtttccaccctcattttgaccggtgtcatcactaactcttttttgggcgcatttatttctcttatcatcgccttgacaggagacaacctgcttccgattgtgcattggctgcttggcagcgtctcaatgaggggctggagctatgttattttgtttctcccgttttttcttttgggaaccattttattgattataaacggaagggaactgaacgtgatgacatatggagaagataaagcaaagcttcttggagtcagcgttcagcagaggaagatgatgattttaatagccggatctcttttgacgggaagcgctgtggcagtatcgggtacgattggttttgtcggccttgtgattccgcatatcacaaggcttttgtggggaacggaccatcggcatttactgccgctgtccgccttgcttggggcagggtttcttgttttagccgatctgctttccagaaccatcattgagccgattgaactgccgatcgggatcattacgtccttggcgggagcgcctgtgttcgctcttattttaattcggcagcaccgcggggggagaagcttatgatgaaggcagaagggctgtcgggaggatacggcgacagccgcctaattaacaatgtcagcttaaccgtggagaagggagaatttctcggaattctcggccctaatggaagcggaaaaaccacgcttttgcacttgctgacaggtacgctgccggccaagaaaggcagggtttatctggccggaaaactgctggcggactataaaccgaaggaactggcgcaaatcatggctgtcctgccgcaaaaaatggatcaagccttcacctttaccgtcgaagaaactgtagcctttggcagatatccattccaaacggggctgttcagacagcagactgaaaaggatgaagccattgtacaggaagcaatggagcaaacaggagtggccgattttgcgcaaaagccgattcgcgaactaagcggaggagaacagcagcgggtgtatttggcacaagctttggcgcagcagccgcgtattttatttttggacgagccgactaattttctcgatctggcttttcaaaaagacctgcttgatctgatcaaacgcctgacgagagaaagcggattggcagctgtcagtgtttttcatgatctgaacaccgcaagcctgtactgtgatgagctcatgtttatgaaaaacggtaccgccgggcctaagcaaaaaccggaatatgctgtcacagaacaaagcataaaggcggtgtacgatacagatgtcaccgctttggttcatcaaagctcacctaaaccgatgattgtgattcagcctgaaaaagatagcgtaaagcggcagtctatcccatttgaagcattgctccaagcgggacgtgatgacattcttctgcaaacggaaattccgcttcgaacattgtcctcgacgcctatcggtgcagggttttcgtggagcaggacgctgatccataaacggctgccagatcagccagatccgatagaaggacttacggcctgtctttcagaaagcggttttcaactgcaggagacgtgtgcgatggcttcttcagaaagacttgaccgtttcgtgtatcgaacgtatgaagacggagagttatccgttttcatatgcgttcagaccggcttttcgatttggattttgattaacggctatgcggcagatcaatacttcatcaaagctcttatggctgccgaagcagaacggacgaaagtgctgggagacggaagaggcacaggtgatattctcatcgccgcgactcaaactcagcaatccgaaaacatagaacagcggctgaaccaattgataaagaaagggacggctgaatgtgtagaagaggctgctgagttgtttgaataagtctgtaaaggagattcagggtatgaaactatatacaaaaacaggcgataagggacaaacgggcttagtcgggggcagaacggacaaggacagcctacgcgtcgaaagctacggcacgattgacgagcttaacagctttatcgggcttgctttggcagagctttccgggcagcccggctttgaagatctgacagccgagctgctgaccatccagcatgagctgtttgactgcggaggcgatctggcaatcgtcacagaaagaaaagactacaaactaacggaagaatctgtttcctttttagaaacgcgcattgatgcctatacagcagaagcgccggaactgaagaaatttattcttccaggcggatcaaggggtgcttcgcttctccatatcgcccgcaccattacaaggcgggcagaacgaagagtggtggcgctgatgaaatcggaggagattcatgaaacagtgctgcgttatctcaatcgtctgtccgattatttctttgccgccgcacgggttgtgaatgcaagaagcggtattggcgatgtagaatatgaaagaagtgccattgtgtttcgggaccgagacagcagtgaatcataaaaagtgaaaacgaaagccggcgtgttcaaatacatgccggcttttttgtttttcactctgtcaatttcccattttacgacaaaaaatgaaccttatgaattattgactgaaaaatggaaaaatgagatattgtaataaatagatgtaaaaaataggcagtggggggctctgatggatggtgaatttaattgaaagtgatagcatctggaagagaaatttcaattatctgtttttctcaagaatagtcaagatatccggcgatatgttcgcatttaattcaatattatggtttttaatttatgacggcaaaggtgcgatcggcactgctttattgattgctgtcacttttttgccggaagccgttctggcgcctgtgacggggccttttatgaaacagaccacgctgaaattttggatgtacttttcagatctgacaagggcggcgattgttttgattatccctctatgtcattttgcgggcttctctccgctgtggtttgtcatgacgcttatgattgtgcattcagctactggagctgcctacaatcccgcctctatcgctttgattcctcaaatcgtcaatgaacagggcattcaaaaagcaaacgctgtgctgcaatcctccgctcaaattgttcggctcggggctgtcacattatgcggcgcttttcttacatttatcagtccttcttataccatgcttatcgcacttgtgctctatttggtgtcgggttttctcgttctttttattaagtacactgcggttgaatctcaatcagagtctgcggttgttacacagagaggaacatatatcggaagactgaaacgcggctttaggctcgtcagaaaacaccagattttatatccgctcgccatttactgtatctttatgaatttcgcggctgccccatgggaagcgctctctgccgtatacgttgcggaagatttaaatggccagccgatcgtatactcgcttttaaaggccaccaccgccgcgggcgcgtttttattagggtttgtgctggcgaaagtcaaagtaaacaggtacggcttgttattcgtcactgccggcattattgaaggatttgctttctttattaccgggatgaatacctttttgccgctcgtctttttcgctgcttttacctttggtgccgcagtcagtgctgttaatgttcctgagtacacgattatccagacgtctgtggatagtgaggatcagccgcaggtttacgccgttatacatatgatctccaatatttcgatccctgccggagctgtcatttgcgggtatgccgcaaatgctttcggctcaggtaaagtgatcgctgtcggcgggattgtagaaattattgcgggtatcggaatcttgctgtttacaaaactggccaaagcagaaaggtccgacctgattaaagaaagggaagcaagtgttcatctgtaaagggttttgaaacgccatgcctcgtgcatggcgtttttttgtgccgatgggtccggtgccagatacgactccggtcttatataaaaatcaatctctgattcgttttgcatatcttccaacttgtataagatgaagacaaggaaaacgaaaggaggatctgcatgaagataaacaagaaaacaataggcggattcttattaattgtatttgggatctctgtcttttttggaggaggaagcttcggctttatcatcccgctcgccatcgggggcttaatgacatacgcaggagtcaaaaggtttgccgcgggaaaaaacatcacgggaatcatcgtgggcggtatcggagccattatgctcatctgctcacttccgtttgtcgtcggaatcgcattggcagccgctatggtttattacggctggaagctgatgaaaaacggatcagctgataacggtgtatcatcttttgatcctgaaccggcttctgttgcctaccaatctcactttgatgacgaatgggaagaatttttgaagaaaaaataatatcaatttattaggaggaatcaggtatggtattaaaaagaatcagagacatgtttgttgcgtcagttcatgaaggacttgataaaatggagaatccaaaggtgatgctgaatcaatatgtacgcgatatggaaagcgacatcgcaaaagcaaagcaaacaattgtgaaacagcacacgattgcctatcaatttaagaaaaaatatgaagaagccgctgaagtggctggcaaacggaaaaatcaggcacagctcgcatttgacgcaggtgaagaagaactggcgaaaaaggcgctgactgaaatgaagcatttagaagggaaggcggctgagcataaagcttcctatgaacaggctaacagtcagctggctgacctgaaagagcagctggcggcacttgaaacaaagcttcaggacgtaaaggataaaaaacaggcgctgattgcgcgggcaaatgcggcgaaagctaaagagcatatgaatacgacatttgacaaaattgacagtgaaagcgcgtatcgtgaatttttacgtattgaaaatcgtattgaagaaatggagatccgcgcgaattattcaaagtcagcggaagccggcacagaacttacacgtaaagaattcgcagacgatgtggaagcggagattgaaaaaatgcgggcgctctcactgcaaaaatcagacaagacaagagcggcaaatgaataagcggaacggggaaggatttgcggtcaagtccttcccttccgcacgtatcaattcgcaagcttttcctttataatagaatgaatgagaaggatgaaaccgaatgaaaaaaatgcttggcaaactgttgatcactgccggtattctggtttttttcgccgtcgtcgtaaaagatgtgtttgctgcaggcctgggtttcataaatggcacagaagccgattcagccagcgcatcgccgcgggacattgacagcatggtcattgagtcggatagcaaggatgtccggattatagcggaagaacgaagtgacatatcggcaggcatttcaggagactcaggaaagttatttgttactgaaaacaaaagaaaactggagctgaccgtaaaggaaaaagcatttcaatttttgaatgggtttaaccgttcaactcttatagtcaggcttccgtatgattataaaggtgatctggcagtacgaacctcaagcggtgacgtgtctgtagccgggaatgaccatcttgcgctttccgggctgaacgcagtatctgcgagcggaaatacgagcgtgacggacgtccgcattcaagacctgaaagtgaaggcatcatcgggggatgtttccatttcaaataccgtctccaaaacagccggcattgatttagcttcaggggacgcaaatctggttcatgtatcaggctctcttgatgtgaaaatgacttcaggagattttaatgctgtattgacaaagataaccggccccgtatctgtcacgctgacaagcggtgatgccaatctaagccttcccaaaaacggcagctttacagtcaaagcgaaatcagcgagcggtgacgtcagttcgccgtattcatttgctgacaaagcacataaagaacagcatcacatcacaggcacgcaaggaagcggccggcatccaatcgacatcaaaacggacagcggggatctagcgatacggtagcaccaggcagaagaaaggaggcggacaccaggaatgacaaaaaaacagcttctcggattgatcattgctttattcggcatcagtatgtttttgcaaattatcggaataggcgatctgctgttttggccgctcttttttctgattgccggctatttccttaaaaaatattcccgtgattggcttggctccgtcatgtatatctttgccgcgtttctatttttgaaaaacctcttcagcatcacctttaatttattcggctatgcgtttgctgcatttctgatttacgccggctacaggcttatcaaagggaagccgatatttgaaccgaatgagaaacaggtcaatctcaataaaaaagaacatcatgatccgccaaaagatgtaaaacatcccgacatgcgcagcttttttatcggtgagctgcaaatgatgaagcagccgtttgacctgaatgatttaaatgtctctggttttatcggtgatatcaaaatcgatttatctaaagcgatgattcccgagggagaaagtacaatcgtcattagcggagtcattggtaacgttgatatttatgtaccatcggaccttgaagtggctgtcagctcagctgtttttataggtgacatcaatctgatcggctcgaagaaaagcggattaagcacgaaggtatatgccgcgtcaaccgatttcagcgagtcaaagcgccgtgtcaaagtgtccgtttccttatttatcggtgatgtggatgtgaagtacgtatgagaaaaaaaatgcttgccagcctccaatggcgcgccatccgcatgacaacgggaatcagcctgctcctttttgcctgcctgatttcctttatgatgttttactatcggctcgatccgcttgttttgctgtcatcaagctggttcggaattccgtttatcctgattttgcttctgatcagcgtgacagtcggtttcgcctcagggtatatgtacggcaaccggttgaagacaaggattgatacattaattgaatccattttaacctttgaaaacggcaatttcgcttatcggatacctccgctcggtgatgatgaaatcggcctggccgctgatcagctgaacgaaatggcgaagcgcgtggagcttcaagtcgcatccctgcagaaactttccaatgaacgtgcggaatggcaggctcaaatgaagaagtcggttatctcagaagaacgccagcgattggctagagatcttcatgatgcggtcagccagcagctctttgcaatatcgatgatgacatcagccgtgctggaacatgtcaaggatgctgatgacaaaacagtcaagcggatcaggatggtcgagcatatggcaggcgaagcccaaaatgagatgagggcgctgctgctccatttacggcctgttacccttgaaggaaaagggctgaaggagggccttacggagcttttggacgagttccgaaaaaagcagccgattgatattgagtgggatatacaggacacagcgatatccaagggtgttgaagaccacttgttcagaatcgtgcaggaggccctttcaaacgtatttagacattcaaaagcgtcaaaagtaaccgtgattctgggcataaagaacagccagctccgtctgaaggtgattgataatggaaaaggcttcaaaatggaccaggtgaaagcatcctcatacggattgaattctatgaaggaacgtgcaagtgaaatcggcggggtcgccgaagtgatttcagtagaaggaaaaggcacccaaatcgaagtgaaggtcccgattttcccggaagaaaaaggagagaacgaacgtgattcgagtattattgattgatgatcatgaaatggtcagaatggggctcgcggcttttttggaggcgcagcccgatattgaagtcatcggcgaagcatcggacggcagcgaaggtgttcggcttgctgcggaactgtcgcctgatgtcattttaatggaccttgtcatggagggcatggatggcattcaagctacaaagcaaatttgccgggagctttctgacccgaaaattattgtgctcactagcttcattgatgatgacaaagtgtacccggttattgaagctggcgcgctcagctatctgttgaaaacctcaaaagcggcagaaatcgccgatgccatccgcgccgcaagcaagggagagccgaagctggagtcaaaagtggcgggaaaagtattatccaggttgcgccactcaggtgaaaacgcgctcccgcatgaatcgcttacgaaacgggagctcgaaatactctgcctgatcgcagaaggaaagacaaacaaagaaataggcgaggaactgtttattacgattaaaacagtcaaaacacatattacgaatattttatcaaagctggatgtcagtgaccggacgcaggcggcggtgtacgcacaccgaaatcatctcgtgaattaggcggctgctatttgtttgcgcctttcgttccgaagtctctgacaatcacattgacccggtagtctatttccgcattgctgaaataatcatcatcccattttcttgaaatctttttccacttttgaggataatgaattctgacctcgtttcccagcccggttacgtccgctttgatctctttctgcagcttctctgtaataaatgacgttactgtttcgtgtactcgtttttcgactgtcttttcaatacttttaatatatgaatccttaaacgagtcttcattgggattccagtcctcagatagacgaccttcaatattgcgggtgacggtgaatttgaactttccgtccttgtatgccgtcttgatcttccgattgcttgaatatacttcataagaaaagagatggccatcgcgcttcaagtcaatgacgcctccctcgacagtgcctgaaaataagctgatattttgaacctcaatcggggtgaggtcccggtgccataatttattttttatgatagaggctccgtttatcgcgagcttgccgttttccttaccgacatgagggatgaggaatgaatcgtcagaggttaagtgttctgagatctcccccaatgtaactggctccatcgttctgatcgtcaccttattattctctgtcagatcatatatcacgttggatgcgggttcgccttcatcattcatgttaaatatatccttagttcggccgttggtgataaagacgtaggaactcctccttgttccgttgtctctgacaaactggttaataatggcttccattccaatttgatccgcaatcacgcttttggaaagcagaatgagacgcaaatgctgtgaaaacgtaggcttctgctttaatgcagaggttctcatcatttgatggacagttttaccctttgtgatagaaagctgtgtcggatcagatgaagagccctccttggcgctgattattttcggcacgagaatttgctgtgtcagctctaaattttcatcgtcaggcttgtctagccctactccgatcactaagcttaattcctcgatattctcactgtcccagcatccggacagcaatagggtgcatataaacatacataaaatccggattttcattttgttgtaatcctcctcttgagagctacaatgaaaaagagaatgaacggaagcagaaacagggagacaaaaatatagccaagataatcgctatacatcatgacttgattggcgtcatccggccagagagaaaaataaaagaccgttatgccgataatcaccatgcttgttttagtcgataatccaaatgtcttctttagcccgttagcggcaaagtatccgtaaatgacaaatgtggtgaaaaactggataatccagaccaccagtaaaaaggattcaaaccgttcaataaatatgcctttaagctcaaaggactgaaagagagaaatagtcggccaaatcagcgttttcacctcgggagcggtcaaggctccgacaacgataatatacgtaaggatatataagataatcggaatcagaaatcctagagacgcatatctgaacgtgtatttctttttcttcatatgttcaggaagaaacagcatcacttccattcctaaaaaagagatggaaacgacggtaagggagtttgcaatgggtccaaggccttcgcctaaaacaggacgcaaattattgatatcaaaaattttaaaactgatcccaaacacaaccagcaaaataataatggttaccgttacataaaagggaaacagccgcgacacatcgcttaagcccccaaccattaaataaatgccgcagcaaataaacgttaaaataatgacttgaattggggttctctccagcaggaaaaacttcaccatttcagccattgcccgtgtctcgaagctggctacgccgaggaaatagccgcagattaaaaggccgatgatgctgccgatccatttcccaagcccttccttcaaatattcaaagagtgaagggtattgatgttttttctgaatgagcgtgtttaaataaatgaagaaaataaaaatgaaaccttctaatatcagcgtgatccagccgtcaggcgtattagccttagtggtcagcgctcgcggcaatgttaaaagtccggccccaagcattgtatttgcaacaatagaaataccttgaaaggtattaagtttcagtggagtctgtttttggctcatttggattattcacctcttttggtttggttttaattgggagacggataatggagtcatccgtatttttcaggctaaagaatccgtttggcgaaaaatacggagacccaaagctcgtttgtctcgttaagtgcgtataaacgacaagcataaataaaataatgccgtatagccctaaaatagcggcggaaaacatcgaaataaaacgcagcacccggaaagacagacccattccgtattgaggaacggtaaaggatgccagggcaatgacactgacgacaatgaccataatcgaactgacgagattcgcttctacagcagcctgtccgatgactacgcccccaacgaggccgatcgtctgtccgagcggattggggagtcgcagtccggcttcccttagcagctcgatggttacttccatcagcagggcttcaaatatcggagggaacggcacgttttccctgttcgccgaaatcgtgacggcgagtgcggtcggcagcagcccctgatggaaggaaacaagtgctatataaatcgatgacaaaaacaaggtgataaagatagaagcaaagcgcagcgaccggataagagatgctgaaatccagcgttcatagtagtcatccggggattgcatcaggatgccgagagaaaccggcaccagcagcacaaatggtgaactgtcgaccaaaattgccacacggccgttaaacagggctgaagatactttgtcaggtctttccgtattttgtatctgcggaaatggtgaatatttattatcttcaatgagctcctcgagcgttccgctgtcctggatatcttccagctggatatttttaagccgcgccttcacttcttttatgacggacttttttgctttgccttcaatgtacataatggctgcaggcttcagcttgttttcgccgatcatgatttttttggtgatcaatttcggatgagaggttctttgtctgatcagagcgagatttgtatcaatatcctctacaaacgctacttttgggccgcgaaccactttttcagttgtcggctctgtcaggcttcttgtttttttctttcctgtggtcagaatataggctttatccaatccgttgataaacacagcacaattgccgttgagaatcgattcaatcgttttttttgcagtttcaacaggtcttgcgtcaagctggtcaaggcgttttttgacctggtcaagcgttaaggtctcctcatctttaatcaaagttttaatggcttctgacaccttattctcatcagtcatttcactgaaatagagatagtaaaaaaccagtccgttcgcaagcatttttttgtttttcaccagatcatcgttttcttttaattttggcagcaccaatgctaaattatcgtgtatatattccttaaactctgtttgttccaatgaggtcacctcttatccaaaaccttagtagaggttatcttttcctgttaaaaaaatgatatactgtgttagagtatttcatggagtaagtttttttatgaaagcggaggatacgaagtggcacaggtaaggctagctggaaaacaagaagaaattgaacagctcattagatcatttgaacagcattatgatgtctcttatacatcaaaggagtacggcaggacaaatccaaaatacaaatattcaaaggattcccgcgtatatcttgaattaaaattaaaatctgccaagatcgaaaaataaaaaggattttttgtgtcattggcgaattatgatctattgaagcaaccgttatggagggatacataaatggaatacagaattgaacgagacaccatgggagaagtaaaagttcctgctgataaattttggggtgcccaaacacagcgaagcaaggagaactttaagatcggttctgaaaaaatgccgatgcgtgttgtgaaggcgtttgcaattttaaaacgaagcactgctctagctaataaacgcctcggcaatctggacgctgaaaaagcagaagcgattgcagcggtttgtgatgatgtgctcaaaggcaagtacgatgacaacttcccgcttgtcgtatggcagaccggaagcggcacacaaagcaatatgaacatgaacgaagtggtagccaaccgtgcgactgctttattaaaagagaagaactctgatcaaacgattcatccaaatgatgacgtgaaccgaagccaaagctcaaacgacacattcccgactgcgatgcatgttgccgctgttttggctgtttacgagcagcttgtgccggcgcttgatcagcttcgcaatacactggatgaaaaagcaaaagcatacaatgatattgtcaaaatcggacgcacgcatcttcaggatgctacgccactgaccctcggacaggaaatcagcggatgggttcacatgctggaccgttcgaaggaaatgattttggaagcgacagataaaatgcgtgcgcttgcaattggtggaacggctgtcggaacgggtatcaacgctcacccagagtttggagagcttgtctcagaagagatcactaagctgaccggccaaacgttcagcagctcgccgaataaattccacgcgctgacaagccatgacgaaatcacttatgcgcatggcgcattaaaagcgcttgcggcggacttaatgaaaatcgcgaacgatgtcagatggctcgcaagcggaccccgctgcggcatcggggagatcgtcattcctgaaaatgagccgggaagctctattatgcctggtaaagtcaacccgacacaaagcgaagcgttaacaatgatcgcagcgcaaatcatggggaacgatgctacaatcggctttgctgcgagtcagggaaactttgaactgaacgtgtttaagcctgttattatttacaacttcctgcaatctgtgcagctgctcagtgacggcatgaattcattccatgataaatgtgctgtcggtattgagcctaataaagaaaccattcaggaaaacctgtcaaattcattaatgcttgttacggcgctgaacccgcatatcggttatgaaaacgcggcgaaaatcgccaagcttgcacataaagagggattgacgctcaaagaagcagctttgaagcttgaattgctgacagaggagcaatttaacgaaatggttaagccggaagacatggtaaaaccaaaggcgtaatagtaagaaagaacggctgctttttaagcagccgttcttctaaatatgttgctgttttaataaatatttaagctgttccgcatctttggcgagagcttcagactccgtcagattatgaatcattccttttatgatcgccagcttcggtgtttttttcttcatttctgcttcaagtatgtccaagctctccgataattcaagagaggagtttgtgtttaagctgttaattttgtcacgtaggcttttcacaatcgattcagtcagcgggtcaggccgtccgtgcgtaagaggcccgaataaagagctcgcctcttccaatgtgatgaaaggcttatcgtttcgttcagacatgccttttaccatatcatcaattcgattcataatgatatcagctaattgagacggcttcacagtgtacccgagcaaaatcatgcattccaggtaaatctggctgatgccctctattaaaaaacaaagctcagcagtgtacggttccgctttttttccatagatgttcagcaggctgtcgatatgaaattgaagtgaggactggcggattttttttgcgcattgctccacttcttctgtgtaaggcagagaaccctccttcaactgcatgctgataaaatctttgtgttcaagaatgttttcatagaggacggtcagctgtttacggtaagccgttctggggctgtcgcccttcgttttaatatttaaaattcgggtaaacgttttatcataatagtagttcagcatagagagaagaagcgcttctttcgaaggaaaataaatataaaaagcgcctttagatattttgcattcttttgcgatttcctggactgatgttgagttgtatcctttttgggcaaatagttttaaggctgtttcaataatcagtttttctttttccttcaatggttccaccctttcggagcccggaggcctgctaggatatgaccatatagtcacaccgtctgttataaaattaaccttattgtaacttgtttttttatcatgtattatttatattataaattgagatgaccgaatggtcaaagctcaagcgaaagggtgaatctagaatgagagaattggacgaaatgatcagccgcttgcgaaacagaggaatcaaagtggagaaagtcaaatatccgaagcagaccttgtcagagaaaaaatgggttcatcaatgcaaacagccgctcaaaacaaattacagagattttaacggctattctttcacataaaaaaatagactgcaaaacatctacagtctattttggcactgctatgcggtacgttacacccgttttgtcattttcaattgagatagatgccttatgaagagttaaaattcgttttacgatgcttagaccaatgccgaattcgcctttcttccctttattaaaaggctcatagaggctggagagcatctcatcttcaatatgcggaccgtcatttttaatggtgatcacgatatttcgatcatcttgtttcatgctgatttctatttttgtctcagcatagcggatttgattttccagaatgttttcgaggagtttgttccattgctccggatcgcccggcatcaaaatatcctcttctacatcaatttcccacgatagttctttccgcgcccacttcaatcgttcgatgacttcttctgtcacttccacaatactgaacatgtcgtgctgcactttttgcttcgctaaataatctagcttcgttaaatataataaatcctttatttttttctccagcttaagagcttcgcattcaataacatctacagtgttttcaaggtctcctttaggaaaaatcccgtctttaattgattgtgtatagcctctgatgaccatgaccggcgtttttaaatcatgagagatattttgcaatagagttctttctgtttcatccttttgcacaagcttttggcgcatctcttcgatggtatggcccaatttgccgatttcatctttccgatccacttttactgggtcatcccaatcctgttcagaaatccgtttgacgtgtttttcaaatgatacaagaggccttgataaatactttgcaagccaaatagccggaatccagcttaataaaatgacgacagctataataaacagaagctgtttgaacaaggtataggccaaatcgtcccgataagaatcaagcgcgtaagagagcatcatcgctgattgtccattgacggaaagtccctttttaatgacaaaaaacactttctctccattgacgtcggcgctgtaacgtttctttttagcttcctgcttatcagccagcttgtacaccttgtggataaatgaagatgacagaatgcttaaatccttgtctgaagaagcctcttcattttcaggaaggagcacgtgctgtacggagcggacagttgtcggcgccgtcgcttcctcgctgtaatagcgcctttcaatcgaacctggcaggcggtactctgtcagaacatgctgctcattttcaatcgtcgtatacgtttcattagtgaaaaaatctcgcagcgtgtttgaaaataacacaagcagtaaaatcgatatcgctaacaggatgccggatatgacaacccatatctgaaacgcgagcggcttgtttttcatgatgacatcatcctgtagccgaaaccgtaaatcgtctccaccttcaattcaggcatctttctgcgcagtctccggacgagatcatcaacgacccggtctgttccgaagtagtcatgtccccacacttttaggaggatatcctcacgagagtatggatgccctttatgatggataaataatagcagcagatcaaattcctttgacgtcaaattgatgatattcccgttttcgtcatagacctcgcgggcgtcttcagcgacccgatacgaggagacggcaatttcatttttttggacaggaggagcttccttatatacgagctgcagcagcttttgcacacggataatcagctcccgcggcaaaaacggctttgaaatgtagtcattgctgccaagctctaagccaagcactctgtcaatatccgcatctcgggcggaaataaaaatgaccggcacgtcaggatctttcgccttgatttcttttattaatgtatagccgtcggtatccggcagcatgatatcgagaatccataggtggggagacggtgtcattttctttctggcgtcttcacctttcgtaaaagatgtaatgttccagccctcattctctaaatacttcgtcagcagttcattcaggttatcctcatcttcaactagataaatggtgtatgacaaggctcttcacatcctttcaacgtcattataaactagttttaacatacggcaggcaattttcataatttcacatattcttttcatttttatcccacaatgtttgtttatgatatggttaagggaagaaaggaagagaaaaagagcgaggaagatgtaggatgatcaaacatattctattttggtgctttgcttttctcctcattattgggacaattgaacttgtacatgcgatgaatatgtaacgataaatgaataaccgttaaaggagtgtaagaacatggattatcgacgtgatggccaaaacgatcaacatcaaactgaaccttcacatacagaacagcagaatacagaaaaccagaagctgattggacattctgaacaagaattgcttgacgcgcctgtgtcgtatgaagcgggacggcaggaaacggcttctgctttagaaatggaaaagcaagaaacggctgtgaaaaaagaaaagaaacggagagccgcatggctgagcccgattttaggcggtattatcggcgggggcctcatgcttggcatcgcgccttatctgccgtcagaccaaaatcaggcgaccgaaaccgcttccgcaaataaacaggtgcagtctgataattttacaacggcgccgataacgaacgcatcaaacatcgctgatatggtagaggatttagagcctacgattgtcggaatctcaaatatccaaacctctcaaaataacacattcggcacgggaggaggctccagctcagaaagtgaaagcggaaccgggtcaggtgttattttcaaaaaagacagcgataaagcgtatatcattacaaacaaccatgtcgttgaaggcgcgaacaagctgactgttacgctatacaacggagaaacggaaactgccaagcttgtcggcagcgataccattactgatttggcagttttggaaatcagcggcaagaatgtaaaaaaagtggcgagctttggtgactcttcacagctgcgcactggcgaaaaggtaatcgctatcggtaacccgctcggacagcagttttccggtacagtgacacaaggtatcattagcggactgaaccggacaattgatgtggatacaacacaggggacggtggaaatgaacgtgctgcaaaccgatgcagcgatcaatccggggaacagcggaggcccattaatcaatgcaagcggccaggtcatcggcatcaacagcttgaaggtgagcgaaagcggcgtggaatcacttggatttgcgatcccaagcaatgatgtcgagccgattgttgaccagctgctgcaaaacgggaaggtggaccgtccgtttttaggcgtgcagatgattgacatgtcacaagttcctgaaacctatcaggaaaatacgctcggcctgtttggagatcaattgggcaaaggtgtttatgtaaaagaagttcaagcaaattcgccggcagaaaaagcaggtattaaatctgaggatgtcattgtcaaactaaacggtaaagacgtggaaagcagtgcggatatccgtcagatcctttacaaagacttaaaagtcggagataaaacaacaatccaagtgctgcgaaagggaaaaacgaaaacgttgaacgcgacactgaccaagcagacagaaagcagttcaagctaagaaaaaaataaaaagctgaacccaaatagggttcagctttttttatcctaagtaagaggaaagcatccacacttgtttttcaacttcttcaattaatccgacaaacaagtccgctgtcgcattgtcttgattttcttcagccaggccgatcacgaatttagattcgctgctgatttgtttgtagtcgtttaccaatgcttgtaccatttctgaagctgatgtttcgtttccgccgtctgtgatagatgcatgctcagtgtattctttcactgtggcaacaggctgtccgccaatcgccagcaggcgctcagcgatggtatccactgtttcagccgcatggtcataaagttcttcaaatttctcgtgcaatgtaaagaaatgaggccctttcacataccaatggaaacggtggagcttagagtataaaagagaccagtttgataattgtgtgttcagtgaattctcaactaatgtttgatttgtttttgcgttttcagttttcataagataacgtcctccttgtgatctgttgttttaattatatcatatactaaataaaaatcaatactaaattataataattataattaaggttatttgaatagctttttcttcaggatagactcccacgcagaccaaggaaaaagcgatcggaatagcagggtgagcttgatgccctttccgatcgggtatcgcaatttctttatgtgctgttttgttgccaattgataaatgaggtcggcaacctcttggggatctccgctttcttctccgtttttttgaacgtaggaaaggatctttttatagtattgatgataggctgaatcgtcagcaggcaccgacataaaatttgataatgacgttgaccagatcgatgtcttgtatgagcccggctcgatcaaagcggtttcgataccgaacggaagcagctcgatacgcaggctttcagaaaaaccttccaatgcatgcttggaagaaacatatggcgacagcgctgggaatccggtcagtccgctgatgctgctcacgtttataatctttgcgccgccatgctttcttatgtaaggcagaacggtttttgtcacatggatcactccgaagacgttcgtttcaaattgttgtctgaaatgttccatcggcacatcctcgacaaaacctccataagccgttccggcgttgttaacgagtaagtcgatcggggcgtaagcactaacggcttttccgaatgagactatagattgttcatcggtgacatcgagagctgtaatgagaatggaatcagacacattgtgtgctgcagccaattcccgaagctgttccgctttttcaggctgtcttgatgtggctatcacgaaaaatgatcgggcaagctttacagctgccagcagaccgaagccgctggacgctcccgttacgattgctatttttttattcatcctaatcctcctattaaactgctacagctattgtacaatcctgaacaggaaatgacgtctgtaaaagaaatttttatacaacaattcagaattgttctataatagaacgaaagaaggaaaggggttttgtgatatggcgctgcaaggggtaggccaaagatgggatcttgattcattttttaagggcgggagccaatcggaagaattcaaaggttatattgagaagctgtcacaaagtctgcgtgcatttcaagacaggactgatgcgtttcaggtgcctgaatcgcctgaagaggctgaagggctgaccgcgttgcttgatttattcgaacagacatccgtcaagcttcagcaggccggcgcttttgttgcttgtctccaggcccagaatatcaatgatcaaaaggctatagagcatctggcactcatgaaccggctttccgcagattttcaatcgtcgctcgttacattagatcataaacttgtggacattgatcaagacgtgtggaatgaattgttaacaaaaccgggattgcgcgatgtttcttacatattaaatgaaagaagacagagggttgccgaaaagcttagccccggtaaagaaaaactgatcgggaaccttgccgtggacggatatcacgcttggagtgacttctacaatatggttgtcgggaaaatgacgatcccctatgaggaaaacggtgaaaacaagcaattgtctgtcggtcaggcggagaatatgatggaccatcaagaccgtactgtcagaaaaacagtatatgaacgtttccgccaagcttgggagagcaagcaagatattttcagcagcacgctgaatcatttggcgggattccggcttgaaacctataaagagcgcggctgggagaatgtcctgaaggaaccgctgcaaattaacaggatgaaaaaagaaacacttgatacgatgtggcaggtcatcactgaaaacaagaagccgttcgttcagtttttgaaccggaaagcatccatgctcggccttgaaaaactcagctggtacgatgtcgaggcaccgatcggttctgacggaaaggtctattcgtatgatgaagccgcaaatatcattaccagccagttttcaacgtttggcaaaaagctgtcctcattcactgaaaaagcgtttcgggacggctggattgaggcggaagacaggagcggaaaaagagtcggcggcttttgcaccagttttcctgacagcggggaatccaggattttcatgacattttcgggcagcgcctcaaatgtctctacccttgcgcatgaactcgggcacgcgttccatcaggaagcaatgctcaacgtcaggccgttaaaccgctcctacgccatgaacgttgcagaaacagcttcaacgtttgcagagatgatagtcgcggacgcgactgtccagcaggccgagaccagggaagaaaagcttgttcttctggaggataaagtgcaaagaagcgttgcgttcttcatgaacattcacgcaagatttctattcgaaacgagattctacgaggaacgaaagcggggagtggtaccggccagccgcttgaatgagctgatggaagaggcgcaaagagaggcatactgcaatgcgttagaagaatatcatccgcttttttgggcatcaaaacttcactttcacatcacgagggtgccgttttacaatttcccttatacattcggctacctgttttctcttggcatttacgcgctggcgcttgaagaaaaaaacgcattcgaagagaagtatatggcgctattgcgagatacggcttctatgacagtggaggatttggcgatgaagcatttgggcgctgacatcacgaagcgcgatttctgggagaatgccatcaagctggctgtgcgtgacgccgaaacctttttacaaatgaccgaatcttaaagaaaaagccgtggcgttaaatgccccggctttttcaattcttctctgaatgaggatttcattctctggatatacctaaaataaatggaatcctacaggggggaaacatatgcatttggtcagagcagccggggctgtatgtctcgcagtggttctgattgcaggctgccgtctcaatgaagaccagcagcaggcagaaggagaaaatacagccgtcacccagctgaagtccgttccctacagtaatttttcgcttcgtgtgagctacggggatggtgagcataaccgttatgaaggaatctatacaaagaacggaactcaggaaaaagcggaaatacaggataagctctccggtgtcaatcaggagggagaagaagcattggatgagatgaaaatgattttgagcgagctttccgtaacagaccaaatggctgaaacagaagtgatacacagtgtgctggcagcatttaatctggacagtcattatgatcatatcgatttaaaattgaagctgaaggacggctccatcagagaaatcaagaagtaatcttgtgataaaaaacccataaacgtcaattatgtccataaaactaattgaaaatgattttcaaagtcagtgttttctgctacaatgagggatatatgaccatatcaaatggctgaatatcggaatcacttgcattgatgataattgacttaaaagcatgtatatagaaaacgtgcaatacatagtgctgctaaaaagccagcaaaaaggagcggttatgggtatgagtgcaatttctacagaaacgctgagcttaggatacggggatgccgttattattgatgagttgaatttaacaattcccaaaggtgaaattaccgtatttattggcagcaatggctgcggaaaatcgacacttttacgttcattagcgcgcctgatgaagccaagaggcggttcagtgctgctggaaggaagagcgattgccaagcttccgacgaaggaagtcgcaaaagagctcgcaatcctgcctcaaggtccttcggctcctgaggggctgacggtgcatcagctggtgaagcaaggaagatatccttaccaaaactggctgaagcagtggtcaaaagaggatgaggaagcagttgaaagagcgcttaaagcaacaaagcttgaggacatggctgaccgtgccgttgattctttgtcaggcggacagcgccagcgggcttggatcgcgatgacgcttgcccaggaaacggatatcatccttcttgacgagccgacgacgtatttagacatgacgcatcaaattgaaattcttgatttgctgtttgagctgaatgaaaaggaagaccggacgattgttatggttctccatgacttaaacttggcgtgccgctatgcgcatcatcttgtggccataaaagataaacggatttatgcagaaggccgtccggaagaggtcatcacttgtgatcttgtgcaaaatgtgttttctatgaactgtcaggttacacaggatccgctcttcggaacgcctctttgcattcctcatggcaggggcagatgcattgtccaggaagcggctttcacatcacatggataaataacgcagcgaaggagctttcaattgagaaagctccttgctgttttttcgaaaggaagatggaaaatggaacaaaaacttcaggagcagctggatggattgctggagaagtatactgagcttctgcttggtgaaacaaacgatgagctaaaagaagaagtgaagcaatggattttgtacacccatatagccaaaagcatgcctccgctcgctaagcattggaatgcgacataccctgatgcaaagcagggcattaaagagatcattcagcatattaaggaattaaatgaagcgcatcgaaacaaacaatagccaaaaagcagtctgttcattatagcagactgcttttttgtgattcagccgttttatctggcgtaaaggattccataaaggttctcagcgcgctgctgataaacgaatcttttcgaacaataaattctgttttcatctggctgagagcttcaggcagcgggtacaatcgaattgatccttctgcttcatgtttctgcacaaccgttcttggcagcagcgagatgccaagacctgctgtaaccccgccgataattgcttcaagcgtcccaaattccataatgactggctgtgtgacaccgacggaacgcagccatttttcaagtgtttctcgatacgaacagcctgtgctgtaaacgagaatcggctttgtgatggcttcctcaacatcgggcacggaggcagccgaaacaactactggttcttcttcaaacgcaggataggattcgagctcaggatgatggcattcgcatccgataaacgcgccatccaattcataacgaagaactttatcaaggagaaattgcgtatgtcctgttgttaaagacagctggacgtttggatgttcttcataataagatgccaggagctttggaagccttaccgcggcggttgtctgagtggagccgatcataagcggcccgcttggttctgcggaggatgagagcgctttagacgcttcatcaagcaggcctataattttatttgcgtaatccagcagcaattttccgcttgcagaaagtgtcatgccccgattatggcgcaaaaacagtgtggtacccagctcagcttccaattgctgaattctggccgtgacattcgattgtacatagccaagctgcaaggctgctttcgtaatggtcccttcacgggctaccatttgaaacacacgtaaatctccgctttccattttgaactcctccgttcgtttgctatcaatatgagtgatatctagtatctttaacaatcattatacgcaacatcaaagctggattacaatggaatcagaaatatactttagtcaacagcaaggagtggcggcaatgaatgtcttgaacaaaatagctctcgtaaccgggggcggcacaggaatcggaaaagcagccagtatggaattggcaaagcgcggggcgattgtggcggtaaattattcacgctcgcaatcagaagcggaggaaacagtggaaatgatccaaaaagctggcgggcaagccttcgccatccaagcagatgtatccaaaaacagcgacgtgcaggatatgattcaagcaatcgtgaacacacacggcacggttgatattttagtcaacaatgccagcattacacggcatattccaatggatgatcttgaggctgcgacagaagacatatgggatgagctgtatgccgtcaatgtgaaagggatgtttttctgcgcgcgggcagtggttccgttcatgaagaaaagcaaggccggggcgatcgtaaacgtcggcagcatcgcaggggtaactggtgccggctcatctatgccttacgcagtatcaaaatcagcggtgcacggtttaacgaaatcattggcccacgccttagcgcctgaaatcagagtgagcggtgtagcaccaggagctgtggcaacgagatggtgggccggacgggaagaaaaaatgaaaagcatgattggctctttgccgctgcagtgtattgctgaaccagatgatgttgccaaattgatttgttcactaattgaacaggaatcactcacaggccaaattatcacaattgacagcggacagacgctgtaaagaaagggatgcagggagatgccatttgtacagattcatttacggtcgggaagaagcgaagcgtggcttcaaaaactgagcaggactgtccaccaatcgatgattgaagaaatcaatgtgccggaagatgactattttcaagtcatcagacaatatgaaaaaagcgaatttttttatgatccattttatctccaagtcgagcgtactgatgaactgatatacattcattttacactgaaacagtcaagaacaactgaacagaaaaaagcactttaccgctcaatcgcgagccggattcattccgagcttggtgtcagaaaagaagatgtgtttatcatgctggccggaaatcaggctgaggattggtctttcggaaatggaagagcccagatgattgaataaaaaaccccgcggattgatacccgcggggtgctctattaatgggaaggtgattcaacggcttttgccgccttctctttttcttgttggtcttccgctttcttatttgatagcttgataggttttaagaacaaggtgaatacggctccgactgcgataaagatcaggcccgtataaaacacgctgtggagcgaatccatcaacgatgtttttaaaatcggcacaatatgggatgagaaagccgcagggatttgtttgaccgcgtccggactgaacagtgattgcagcagcccttgcggatttgtatcaatcataccctttagctgggcggcaaacgagcttgcctgtgccggaagagagtctaaatatggaaccaatttatctgttaatagatttcctgatctcgcattcattacggctcccagcatggtaatgccgaatgttccgccgatagaacggaagaattggctggatgaagtgacaactcccagctcctccttcgaaaagctttcctgtaaagccaatgtcagaatcggcataacaagacccattcccagaccaataatcgccataaaagatgtagcgacaagcttactcgtgtcgagatccaaggtcgttaacagcaggaatccgctggccataaccagcatgcctgcaatgatttgcggtttaatcccgattttataaacaagctgtccgccgatgatacttgtaataatcatagaaatcatcatcggtgtcataattgtacccgattcagacgcacttacaccgacaattccctgcataaagaaaggaacaaacgtaatggcgccaaacataccgatactcataaagaagccgatcaagtttagaaatgtaaatgttctgtttttaaataaatacattggcaggattggctcttttgcttttgattctacgatgataaagctgacaatgccgatcagtgcgagagcgaacaacccaagaatctgccatgaatcccatgcataatcttttccgccaaagcttaaggcgagcaggaggctgaccacaccgacaatcattgtgaaaataccagcgatatcgaagttgatcggaccagtctgctggcgtccctgtaatcctctggcaataaaaataaccgcaataattccgactggcaggttaatatagaaaacccatttccagtttaacgagtctacaatccagccgccgatttgcggcccaatcactgaagccagcccgtaaattgcgccaaagacaccttggaatttagcacgctgttttcctgtgaacaagtcaccgatgacaatcatcgccatcggcatcatgatgcctccgccgatgccctgcagtccacggaagataatcaattccgtcatgttgttggccattccgcacaaagcagaagcggccataaaaataatcaaacctgatacatagacaatgcggcgtcccaataaatcagccagtttaccggcaattggaacaatggttgttgatgttaacaaatatgcagttgtcagccaggtcatcatgctcaaaccgcccagatcaccgacaattttcggcatggccgttccgacaatggtaccgtcaagggctgaaaaaaacatggcaataattaagcctgttattaataacgttcgttttgattgtttgccttctttactcattttcatccgtttcctcttttcatgttttgcttttcatccgtttctgctgcttgtgcgagctttgctgtaatatgcgccgcctgcagcatctcctcctccgtcaaaaaggaaagatagcgcgccataatggcctttctgcctgccaaaacctcctcgaactttctgtctccttcgtcagtaagactgagatcaatcactcgcctgtcttttgtgttgtgtgttctggcgataagatttttttgttcaaggcgatctgccatcagcgtcaccgcgcttggcttcacctccatacgctcggcaatttcagaaactttgaggctgccgtgtttctttaggctggccagcacaaacagctgcgctggggtgacaccttgtttctccatgctttccagcatttcaggctgtatcttttgaaagagcgcctgaagcgataattgaatatcggacattaactgatccgcactcttcatattcatttcccctctgttacatacactgtatatatattttaatgacaaaatagttaatgcttattaaatataaataagcgtaaatgaaaagtcaactgattttacacaaaaaaaggatagatgcccgaaagaacatcgtatcctttttactaatgttgttattgctgataaggagactgctgctgaatggtctgctggaatttttgataggactgctgcagcttttgtgcatcctccgcttcaacagaataccatccatattggaacatgagatcatatagttttctttgcgctttttgtgactcatcaaaaatggattgaatatcctgataaagagactcgtggctgaattcgtgcaaggcagtgcaataagctgttgtcatgtatttttcggttgtcagcaattcgttgacgaaatctctgtcattcatttccgatgttgtcggtacaggtgtctgcgggttgctgattttttgattttgctgattcattctggcgcctccttattggatgtagccggactgctgctggcctggctgcaggtgctttaatattctttgatagtgatcatgatgcatgtgtccgacgcggtcgagttcttgctttaacgtttgatcctggcactgctgcgccatgaaatgcgctttcttcatcgcgagcaaattccagttcagcatgtcattgagatacaaatgatcctttgtcgaaataacggaaggcggcatttgagattgctgctgattatccattgtgatcctcctttggtttctgttcattttatagtttccttcagactgggagttatatacaggtgttttgaagatgacggcgggagggagtcggatgttgagacatgtgtttttattcttatctcaaaataaaacacttaccaagttcgcaaaagcatacggaacgcggcttggagcacgaaggtttgtcgcaggggatacgattgaatcggcggttaagaccgtcaaaaggctaaacagatccggtttgtgtgcaacaattgattatttaggcgagtatgcagcttcggaaaaagaagcaaaccaagtcgcagaggaatgcaagaaagccattcaagccattgccgaacatcaattggactcagagctttcacttaagctgacctcaatcgggctcgatctttcagaagaacttgctcttactcatttgcgcgccattctttccgttgcgaagcaatatgatgttgctgtgaccattgatatggaagactattcccattatgaacagacactttctatttacaggcaatgcaaacaggaatttgagaagctcggcacggtcattcaggcgtatctgtaccgggcggcagaagatatcagaaagatgcgggacttaaagccgaatctcagacttgtaaaaggcgcttataaagaatctgcggccgtagcgtttcccgacaaaagaggaacggaccttcattttcagagcttaataaagctgcagttgttaagcgggaactacacggctgtcgccacacatgacgatgacatcattgcatttacgaaacagctcgtcgccgaacatcgaatccctgcgtcgcaatttgagtttcaaatgctatacggcatcaggccggagcgtcagaaggaactcgccaaggaaggctacagaatgcgtgtgtatgtcccatatggaacggactggttcagctactttatgagaagaattgccgagcggcctgccaatgcagcgtttgtgttaaaaggaattttgaaaaagtgaaagcagccgcgggaagcagctgcattatgattgttccatgttatgttttttatactgctgattttgacttgtccgttttccgccgccgtaatgctgagtcggaccggcatctccctttacgctcgccgcgctgactgccgctgaagacggattttttttctctcgtaccattcccttcacctccgggcttaagttgcccgacttttataggcttcatacaaaaaaataacaaattagctattgaagtcgaaccggaaatcttttaagatgaaagaagaaacgggtttcattttttttggtcaaaaaatgaatgactattcattcaatgttcaagggggatatctcatgcacaaacacattcggaaggcagccgttttaggatcgggggtaatgggctccgggattgcggcgcatttggctaacatcggaatacctgtcctgctgctagatattgtgccgaacgatttgacaaaggaagaggaaaaaagggggctgacgaaggacagtccggaggtgcgcagcaggctgagccggcaggcggtgaaaaaactgctgaaacaaaagcccgctcccctcacatcagcgaaaaatacctcctatattacaccgggcaatctggaggatgatgcagaaaaactgaaagaagcagattggattattgaggtcgttgtcgaaaaccttgaagtcaaaaagaaaattttcgctcttgtggatgaacatcgaaagactggaagcatcgtctcaagcaacacatccggcatatcagtgcaggaaatggctgaaggccggtcggatgattttaaagcccattttctcggaacgcatttttttaatcccgcacgctatttaaagctgctggagatcattccgattaaggaaacggatcctgatattttaaagtttatgacagctttcggagaaaatgtcctcgggaaaggtgttgttacagcaaaggacacaccgaactttatcgcaaaccgcatcgggacgtacgggcttctcgtgacagtccaagaaatgctgaaaggcggctatcaggtcggggaggttgattcgatcacaggaccgctgatcggcaggccgaaaagcgctacctttagaacgcttgatgtggtcggtctcgatacattcgcccacgttgcccgaaatgtgtatgacaaagctgatggcgatgaaaaagaagtgtttcgccttccaagcttcatgaacgatatgctggaaaaagggtggatcggaagtaaggccggccaaggcttttataaaaaagaaggaaaaacgatttatgagcttgacccagtgacgcttacttacggcgagcggacaaaaatgaaaacaccggcacttgaagcggcaaaacaggcaaaagggacaaaagccaaaatgaaagcgcttatttattcggatgacagagccggccgattgctgtggaatatcacatctcaaaccctgctttactcagccgagctgcttggcgagattgccgatgatattcatgcgattgaccaagccatgaagtggggattcggctgggaactgggaccttttgagatgtgggacgccatcggcctcaagcagtcagcggaaaagcttgagcagcttggagcagatatgcctggctggataaaagagatgctggacaaaggaaatgaaaccttctacatcaaagagaacggaacggtattttattatgaccgcggcgaatacagagctgtgaaagaaaacaaaaaacgaattcatttacaagcacttaaagaaacaaaaggcgtgattgcgaaaaacagcggagcaagcttaattgaccttggagatgatgtggcccttcttgaatttcattcgaaaagcaatgcgatcggccttgatatcattcaaatgatccacaaaggattagaggaaacagaacggaattacaaggggcttgtcatcggcaatcaagggaaaaatttctgcgtcggcgcgaatctcgccatgatcttaatggaagtccaagatgacaactttttggaagttgattttgtgatccgccgttttcaggagacgatgatgaagatcaaatacagtgcgaaaccggtcgtcgccgcgccatttggcatgacgctcggcggaggaacggaagtatgcctgcctgcggcgcgtactcaagcggcaagcgaagcctatatgggccttgttgaatcaggtgtcggcctcatccctggcggagggggaaacaaagagctgtacatcaatcatctacgccgtggccttgatccgatgaatgcggcaatgaaaacatttgaaacgattgcgatggcgaaagtgtccgcttccgctcaagaggctcgtgagatgaacatcttaaaagaaacggatcagatcagcgtgaatcaagaccacctgttatacgatgcgaagcagctggccgcatctttatacgataccggctggcggccgcctgtaaaagaaaaggtcaaggtgccgggagaaaccggttatgcggcactcttgcttggcgctgagcagatgaagctgtccggctatatatctgagcatgatttcaagatcgcgaaaaaactcgcttatgtcattgcgggcggaaaagtgccgtttggtacagaggttgatgaagagtatttattggagatcgaaagagaagcgtttttgagtttggcaggagaggcaaaatctcaagcgagaatgcagcatatgcttgtgaaaggtaaacctttacggaattaggagggagcttatgaaagaggcagtcattgtgtcaggtgcaagaacaccggttggaaaagcaaaaaaaggatcgttggccaccgttcgcccggatgatttgggagcgatttgtgtaaaagaaacgctgaaacgggcaggcggctacgaaggcaatattgatgacttgattatcggctgtgcaacacctgaagcggagcaggggcttaatatggcgagaaatatcggtgcgctcgcgggcctgccgtacacggttccggcgattacagttaaccgctattgctcttcaggccttcagtctattgcgtatgcagcagaaaaaattatgctgggcgcctacgatacagcgatcgccggcggagcagaatccatgtcgcaagttccgatgatggggcatgttacccgtccgaaccttgctttggcagaaaaggcaccggaatattatatgagcatggggcacacagccgagcaagtcgcgaaaaaatacggcgtctcccgtgaggatcaagacgcgtttgccgttcgcagccatcaaaacgccgctaaagcccttgcagaaggaaaatttaaagatgaaattgtacccgtcgaagtgacggtgacagaaatcggagaagaccataagcctatggaaaaacagtttgtgttttctcaggatgaaggtgttcgcccgcaaacgactgcagacatcttatcgacattgcgcccggccttttccgttgacgggacggtgactgcgggcaattcctcacaaacgagtgacggagcggcggctgtcatgctgatggaccgggaaaaagccgatgctcttggcctggcgccgcttgtgaaattccgctcctttgcggtaggcggcgtgccgccggaagtgatgggaatcggaccggtggaagcgattccgcgcgctttgaagcttgccggacttcagctgcaggacatcggcttgtttgaactgaatgaagcttttgcctcacaggccattcaagtaatcagggaattgggaattgatgaagaaaaagtgaatgtcaacgggggcgcaatcgcgcttggacacccgcttggctgtacgggcacaaagcttacactctcactcatccatgaaatgaaacggagaaacgagcaatttggagtcgtgaccatgtgtatcggcggcggaatgggagcggccggtgtatttgaattatgctaaagggggaaaaacaaatggcaaaaaaagcggctgacgtacaaaaaggcggcggatttttaatcgaggatgtcacatacgatcaattgtatacaccggaggatttcactgacgagcataaaatgattgcgaaaacaacagaggattacatcgagcaagatgttctccctcatatagatgatatcgaaaaccatcaattcgagcattctgtcagactgttgaagaaagcgggcgaactagggctgcttggcgccgatgtgccggaagaatacggcgggctcggccttgataaaatcagctcggcactcatcactgagaaattttcgcgtgcgggaagcttttctctttcttatggcgcgcatgtcggtatcggttccttgccgatcgtctttttcgggtcagaagaacaaaagaaaaaatatttgcctggactcgcttcaggcgaaaagatcgccgcttatgctctgactgagcctggctctgggtctgatgcacttggagcaaaaacaacagctgtgctgaatgaagcaggaacccattatgtattaacaggggaaaaacagtggattaccaactctgcttttgccgatgtatttgtagtttacgctaaggtagacggcgacaagttttcagcctttattgtagaaaaagagttcccgggtgtctccacgggaccggaagaaaagaaaatgggaatcaagggatcatcgacaagaaccctcattctggatcaagctgaagtgccaaaggaaaacctgctcggagaaatcggcaaagggcatgtcatcgcctttaatattttaaacatcggccgttacaaactggcggttggcacaatcggcgcatctaaacgcgtcatcgagctgtctgcggcatacgcaaatcagcgccgccaatttaaaacgccgattgctggtttttcattgacacaggaaaaaatcgggacaatggcctcaaggctgtatgcgatggaaagctctgtatacagaaccgtcgggctgtttgaagacaatatgagccagttcacggccgaagatctcaaggacggccggcaaatcgccaaatcgattgcggaatacgccatcgaatgctctctgaataaggtattcggctctgaaacgcttgattatatcgttgatgaaggcgtgcagattcatggaggctacggctttatgcaggaatacgaagtagaaagggcctatagggattcaaggatcaatcggatttttgaaggcacaaacgaaatcaaccggttaatcgtgccaagcaccttcctgaaaaaagcgcttaaaggcgagctgcctttattcgaaaaagcgcagtcgctgcaggaagaactcatgatgcttatgcctgaagagcctggaagcggcgtcttagagcaggagaaatatatcgtcaagcaagccaaaaaaattgcgttgtttgctgccggcctagccgcgcaaaaatacggaaaagcgatcgatcgtgagcaagaaattctcgtgaacgtagcggatatcgtcagcaatgtatacgcaatggaatcagccgtgctcagaacggaaaaggccattgccgcacaaggcgctgaaaaagcagcgcaaaaggtgctgtacacagaaattttcgttcaagaggcctttaacgaaatcgaagcgcatgcaaaggaatcccttatcgcaatggaagaaggagattcactccgcatgatgctttccgctctgcgcaagctgacacgcgtaacgcctaaaaacgtgattcagaaaaaacgcgaggcggcggcaggcatttttgaggctgagaaatatactgtctgattggccatgagctccgcatgcgcggagctcttttttaagaagcactgttttaggtttttaaaacaaactgtgttaaaataacctcgattattttattgagggggaagaagatgtcgttaactttttactggtaccctaaatgcggaacgtgccgcaaagcaaagaagtggcttgaagagcatgggaaagaaataaacgaaatacatattgctgagcagccgccaagcaaagaagaattaaaagcgctttatgaaaaaagcgggctggatctcaagaaatttttcaacacgagcggcatgaaataccgcgagctcaatctcaaggaaaagctgtatcatatgtcagaggacgaacagctcgaactgctggcttcagatggtatgctaattaaacgcccgcttacaacagacggcgaaaaagtgactgtcggatttaaagaagaccaatttgaagaaaactgggcttaatgtaaattttttttgaaaagtgtggtatcttcttattgtagtgctgtaaaaaatggagggattcaattgagcataccaaaagatttgcgttactcaggagaacacgagtgggtaaaagttgaaggagaaaaagccagaatcggaattacgcattttgcccagtccgaactaggcgacatcgtgtttgtcgaacttcctgaagtgggcgctgaaatcaaagcggacgagccattcggcagtgttgaatccgttaaaacggtatctgagctttatgcaccgattaacggaacggttgtggaagtaaacgaagatcttgatgacagtccggaattcgtcaacgaatctccgtacgaaaaagcatggatgatcgtcgttgagccatctgacgcttctgaaattgaaaaactgatgacagcagagcaatacgaagagatgacacaagaagactaaaacaggatagccgtaaaagcaattggacacgctaacgttatgggaggtgtccaatatggctttcgacaaacaaaagctcgatgtcaccaatgacgtgacaggccgctttcaaaatggccggctctcgttatatcatgataatgagatgatcggccaaatgacaagcatgaatgaatatgagcttaagtccggttattcctttgaaaatgagaaattttataagacagccgatgtggtctctggagacgacgcaaaatatgtagattgtgactacgaaaacggctggtgttaatgttggcggtgaatttcactgccttcttttacaatctgaacatttcaaatttgacgcggcaggtgaacaagatgaagatggatgagctggaaaaggttatgattgtcgaggggaaatcagataaagagaaaatcgaaagcgtcctgaatgaaccgatgcgcattatctgcacaaacggaacaatcagccagctgaggctcgaggaattggctgacgagctttatgataaagacgtctatatattagttgatgctgatgaatcaggtgagaaattgagaaaacagctgaagcgtgaatttaatgaagcctgccatctccatgtcgacagagcctataaggaagtagcggctgcgcccaggcaccatatcgcttctgtattgctgcgtgcgaatctgaatgtccatactatttttcttgaaagaaagtcccgaggtgtatagcatgaaagaactccaagaacacgaacttgatcacattgaagatgatgtgtaccttctatatttatatactccgttttgcggcacctgccagcttgcaagcaaaatgctgacagtggtgaaagaaatgctgccggatgtcgccttctatcaaaacaatgtcaattactctccgacattcgcaaaagcgtatcaaattgaaagcgtcccttgttttctgctgtttaaaggcggaaagatggtcgaaagaggatatgcatttcattccgtttcttatttatatgagctgatcaaacaaaaatcatcttccgcatcccatttatgacatatttctcagcatatccaatgaaattgtcgttcgttttataaaggggttcttgcgacaaagagagaaatgtgtatgtatgaccaacaaataggaggttgtacatatggagaaagcggaagttttagaagatgagtatcagcatctgtttttaaaaccccttttgaatgcctcaacattgctcattaccttccaaggagaagcagaagccttaaccgtctcaataaacgaacagggagaaatgaaaaaagtttctccgccccaaacgtccaacctgaccttttacggaaaccaaacggaaattattgatttattgcacggagacatttcccttcagcaccttattcagagcggaagcctcaaagtaaaggggtcattcagggccctgttaaagctggaagccattctctggctgacaaatggattttttcagaggattttaaaaaattaaaaaataataaattattataatagtaaaagttgacatcatttattttattgacatttaatcattcgccgtgctattctacattaagaatttccggacgaaaaagactatatatttctcttatcaagagaggtggagggaagtgccctatgaagcccggcaaccatcaacactgttgaaatggtgccaattcacacgaagcgttcagctttgaaagatgagagaaaggcattttatataagcctttctgctcaagtgtgcagaaaggcttttcttttgcagaaaaaaccggaagatttcttagaatagtgttaaggcaggtgattgctttgatcaatcttcaggatgtttcaaaagtttacaagtcgaaacatggagatgtcaatgctgtccaaaacgtctcgctttccattaaaaaaggtgagatttttggaattataggatatagcggagctggtaagagttccttaatccgtctgctgaacggccttgagaaaccaacctcaggaaccgtggaagtggcgggaaccaagattaatgaagtaaatggacgcggtttaagaaaagcacgccatgagatcagtatgattttccagcatttcaatttgctttggtcgcggactgtcagagataatatcatgtttcctttagaaattgccggggtgaaaaagagcgagcggatcaagcgcgccaatgaactgattaaactggtaggtttagaaggaaaagaaaaatcttatccgtcccagctgagcggcggtcagaagcagcgtgtcggaattgccagagcgcttgcaaacaatccgaaggttcttctttgtgacgaagcgacatcagcattagatccgcaaacgacagattcaattctggatctattgtccgatattaatgaaagactcggtttgacgattgtgctgattacgcacgaaatgcatgtcatacgcaaaatctgcaacagagtcgccgtcatggaaaacggcaaggtggtcgaagaaggcgaggttctcgatgtcttcaaaaatccaaaggaacaaatgacaaaacgatttgttcaacaggtgacagagccggaagaaacgaaagagacgcttcagcaccttcttgatgatacagcatcaggaaaaatggttcagctcacatttgtcggtgagtcagctgaacagcctctgattacagagatgatcagaaacttcaatgtcagcgtcaatattctgcaagggaaaatttcgcagacgaaggatggggcttacggttcactgttcatccacattgacggggacgaggaagaagtgcaaaacgtgatccgattcattaatgacaaacaggtgaaagcagaggtgatcacgaatgtttgaaaaatacttcccgaacgttgatttaactgaattatggaacgcgacatatgaaacactttatatgacgctgatttctttactgtttgcttttgtcatcggggtcatcctcggcttgctgctctttctgacgagcaaaggaagcctctggcagaataaagcggtcaactcagtgattgcagccgttgttaacatattcagatcgattccgttccttattttaattattttactattaggttttacgaaatttttagtcggcacgatcttagggccaaacgccgcattgccggcgctggtaatcggctcggcaccattttacgcgcgccttgttgaaatcgcgctgcgtgaggtggataaaggtgtgattgaagcagctaaatcaatgggcgcgaaaacgtctacgattattttcaaagtgctgattccggaatcaatgcctgctcttatttctggcattacggttacagccatcgctttaatcggttcaacggcaattgccggagccattggttcaggaggccttggaaaccttgcgtacgtagaaggatatcagtctaataacgctgatgttaccttcgttgctactgtgtttattttaatcatcgtgtttattattcaaatcatcggtgatctaataacaaatattatagacaaacgataagggaggatttacattgaaaaagctatttttgggtgcattactgcttgtatttgcaggagttatggctgcctgcggttcgaataacggcgctgaatccggcaagaaagaaattgtcgttgcggcaacaaaaacaccgcatgcggaaattttaaaagaagctgaaccattgctgaaagaaaaaggctatacgctgaaagtgaaagtgcttagtgattacaaaatgtacaataaagctttagctgataaagaagtggacgcgaactacttccagcacattccttaccttgagcaagaaatgaaagaaaacacagattacaaacttgtgaatgccggcgctgttcacttagagccattcggtatttactctaaaacatacaaatcactgaaagaccttccagacggtgcgacaatcattctgacaaacaacgttgctgaacaaggacgtatgcttgcaatgcttgaaaacgctggattaatcactcttgattctaaggtagaaacaattgacgcaacactgaaagacattaagaaaaacccgaaaaaccttgaattcaaaaaagtggcgcctgaattaacggcaaaagcatatgaaaacaaagaaggagacgcggccttcatcaatgtaaactatgcgatccaaaataaattaaatcctaaaaaagacgcaattgaagtagaatcaacgaaaaacaacccatacgctaacatcatcgcagtaagaaaaggcgaagaagattctgcaaaaatcaaagcgctgatggaagttcttcactctaaaaagatcaaagacttcatcgagaaaaaatacgacggagctgtgcttcctgtatctgaataagactgaaaccccggatgagaaatccggggtttttttcgcgtattttcctaaaagctgttcataataaaaaggaatgttaaacagatggagggattttctttgaatcaagacagaggaagcatgcaggacgcgttaaaacaatataaacatggtttaggcacatttgaacaaaagatgccgctgatgggacgaaaatttaacgaatttactgaacagtgctttgccgggaattctctgactgaaagagaaaaacagctgatcgccctcggaattgccatcaatgctcaggacgaatattgcatgatctatcatacaaaaggctgtctcgatcagggagcaacagaagaaaacattctcgaagccgtcagtgtggcagcggcatttggaggcggcgcagctttcagccaaggcgtgacagttgttcaacagtgcattgaggaattcggaaacaccacgcattaagagaaggaatattccgaaaaaccattctcatttgttctgaaaggatgctttcgtctcatctgccgctatttcacgccaaatcgtttttgcggcatccaacgcagcactggtacaataaaaagcaaatatatgaagggattgattcattatttgcagcagccaggacagactgaacctcgattatacgtcagaaatggaaaaagcgatgcagctgtcacacggaattggatacgaggaatatggacgccggctggaaacaagaatgaaggtagagcggcagagagagcttgattatgaaaaaagcaagcggatttctgcgggagcttattgagaaaatcaatcttttaaaaaagggtgggaatccactctttttctttttcaatcgctttaataaagtgctgatctttgttaaacttgaggaatgtgcaaggcacgataaaaagttgtatttacttttcatttgttataaaattagaatgagaataaaatgagaataatgattatatatttttggaggtatagatatggctgcttcaacattaacgatcaaagatcttcacgttgaaatcgaagggaaagagatcttaaagggtgtaaaccttgaaataaaaggtggagaattccacgcagtaatgggcccgaacggaactggtaaatccactttatcagctgctattatggggcatcctaaatatgaagtaacaaaaggcagcatcacgcttgacggcaaagatgtactggagatggaagtggacgagcgtgcgcaggcaggcttattccttgcaatgcagtacccaagtgaaatcagcggtgtgacaaatgccgacttccttcgctcagcaatcaacgcgcgcagagaagaaggcgatgaaatttctctcatgaaattcatccgcaaaatggacgaaaacatggagttccttgaaatggaccctgaaatggctcagcgctatcttaacgaaggcttctcaggcggggagaaaaaacgcaacgaaatccttcaattaatgatgattgaaccgaaaatcgccatccttgatgaaattgactcaggtcttgatattgacgctttgaaagttgtatcaaaagggatcaacaaaatgcgcagcgaaaacttcggctgcctgatgatcactcactatcagcgcctgttaaactacatcactccggatgttgttcacgttatgatgcaaggccgcgttgtaaaatccggcggtgcagagcttgcacagcgtcttgaagcagaaggttatgactggatcaaacaagaacttggcattgaagacgaaactgttggccaagaagcgtaagcgttagggggattaatatgacactaggtacaaaactatccgtagatcaggagtatctcaaaagcttttccgaaaagcaccaagaacctgcctggctgaagaacctgcgcttacaggctcttgaacaagctgaggatctgccgatgccgaaacctgacaaaacaaaaatcacaaactggaacttcacgaatttcgcgaagcatacagtggataacgaaccgctttcttcattagaagatttgactgatgaagtaaaagcgctgatcgacgttgaaaacgaagataaaacattatacgtacagcgtgaccagacgccggcatatctttctctttctcaagaattgaaagacaaaggcgtcatcttcactgatattctgactgctgcacgtgagcacagcgacttggtggagaaatactttatgaaggacggcgtgaaagttgacgaacataagttaactgcacttcacgcggctcttgttaacggaggagcattcctttatgttccgaaaaatgttcaggtggagacgccggttcaggctgtttatgtccacgaaagcaatgatacagctctattcaaccacgtgctgattgtggctgaagaccacagctctgtaacatatgtagaaaactacatcagcactgtaaacccgaaagacgctgtcttcaatattatcagtgaggtcatcacaggtgataatgccagcgtgacatacggtgcggtggataatctgtcaagcggtgtgacaacttatgtgaaccgccgcggtgctgcgcgcggacgcgacagcaaaatcgagtgggctcttggcctgatgaacgacggcgacacgatttccgaaaatacaacaaacctttacggtgacggcacatacggcgatacgaaaacagttgttgtcggaagaggagagcaaacagaaaacttcacaacacaaatcatccatttcggtaaagcttctgaaggctatatcttgaagcacggtgtgatgaaggattccgcttcttctatctttaacggaatcggcaaaatcgaacatggcgcttctaaagcgaatgcggagcaagaatcacgcgtgctgatgcttagcgaaaaagcacgcggagacgcaaatcctattcttttaattgacgaagacgatgtaactgcaggacatgcggcatctgtcggccgtgtggaccctattcagctttactacctgatgagccgcggaattccgaaagaagaagcagaacgcttagtcatttacggattccttgcaccggtagtaaatgaacttccgattgaaggcgttaagaaacaattagtttctgttatcgaaaggaaagtgaagtaatgaatatcacagatattcgtgaacagttcccgatccttcatcagcaagtgaacggacatgatctcgtttatctcgacagcgcggcgacttcccagaagccgcgtgctgtcattgaaacactggataagtattataaccaatacaattccaatgttcaccggggcgtccatacacttggaaccagagcgacagatggttatgaaggagcgcgtgaaaaagtccgcaagtttattaacgcgaagtcaatggctgagattattttcacaaaaggcacgaccacatcactgaatatggtggcgttaagctatgcgcgcgccaacctgaaacctggtgatgaagtggtcatcacctacatggagcatcatgcgaatatcattccgtggcagcaggctgtaaaagcaactggcgccacattaaaatatattccgctgcaggaagacggaacgatttctttagaagacgtcagagaaacggtcacaagcaacacaaaaattgttgcggtgtctcatgtatctaatgttctcggcacggtcaacccgattaaagaaatggcgaaaatcgctcatgacaatggggctgtcattgtggtggacggtgcacaaagcacgcctcacatgaaaattgacgtgcaggatctcgattgcgacttctttgcgctttcttcccataaaatgtgcggacctaccggtgttggtgtgctgtacggaaagaaagccctgctggaaaacatggagcctgccgaattcggtggagaaatgatcgactttgtcgggctttatgaatcaacttggaaagagcttccgtggaaattcgaagcgggtacgccgattattgcaggagcaatcggcctcggtgccgccattgattttctcgaagaaatcggtcttgatgagatttcccgccatgagcacaagcttgcagcttatgcgcttgaacgcttccgccagcttgacggcgtaacggtttacgggccggaagagcgtgccgggcttgttacatttaaccttgatgatgttcatccgcacgatgtggcgactgtgcttgatgcggagggaatcgcagtcagagccggccaccattgcgcgcagccgctgatgaaatggctggatgtaactgctactgcaagagcaagcttttatctgtataatacagaggaagagattgataagcttgtggaagctcttcaaaagacaaaggagtattttacaaatgtcttttaatgcaaacttagatacattgtacagacaggtgattatggatcattacaaaaacccgcgcaataaaggggttttaaatgacagcatcgtcgtggatatgaacaatccgacatgcggcgaccgcatcagactgacaatgaagcttgacggagacatcgtggaagatgcgaaatttgaaggggaaggctgttccatttcaatggcatccgcttcgatgatgactcaggcgattaaagggaaagatattgaaactgccctttccatgtctaagattttctcggatatgatgcaagggaaagagtatgatgattctatagatctcggggatattgaagcccttcaaggcgtttcaaaattcccggcccgtatcaaatgtgcaaccctctcatggaaagcacttgaaaaaggagtcgcgaaagaagaaggcggcaattaaaaggattggagtgaaaatggatggctaaaaaaatgcctgatattggtgaatacaagtatggttttcacgacaaggacgtttccattttccgttcagagcgcggattgacaaaagaaatcgtagaagaaatttctcgcatgaaagaagagcctcaatggatgcttgacttccgcttgaaatcacttgagcatttctacaacatgccgatgcctcaatggggcggagatttaaactcactgaactttgacgaaattacgtactacgtaaaaccgtctgagcgttcagagcgttcttgggatgaagttcctgaagaaattaaacaaacattcgacaagctcggtattcctgaagctgaacaaaaataccttgcgggtgtttctgctcagtacgaatctgaggttgtataccacaacatgaaagaagatcttgaagcgcaaggtattgtctttaaagacactgacagcgcgctgaaagagaatgaagatattttccgtgagcactgggcaaaagtaatcccgccgactgataacaagtttgcggcgcttaactcagctgtttggtccggcggatctttcatctacgtgcctaaaggcgtgaaggttgaaacaccgcttcaagcttacttccgtatcaactctgagaacatgggtcagttcgaacgtacactgatcattgttgacgaagaagcaagcgttcattatgttgaaggctgtactgcgcctgtttacacaaccaactcacttcacagtgcggtcgttgagatcatcgtgaaaaaaggcggctactgccgttatacaacgatccaaaactgggcgaacaacgtttacaaccttgtaacaaagcgtacagtctgtgaagaaaacgcaacaatggaatggatcgacggcaacatcggttctaagctgacaatgaaatatccggcttgtatcctaaaaggcgaaggcgcgcgcggtatgacgctttctatcgctcttgcgggtaaaggccagcatcaggatgcaggtgcgaaaatgattcaccttgcaccaaacacatcatctacaatcgtatcaaaatcgatttcaaaacagggcggaaaagtaacgtaccgcggaatcgtccacttcgggcgcaaagcggaaggcgctcgctctaacatcgagtgcgatacgctcattatggataacaaatcaacttcagacacaattccttacaatgaaatcttaaatgataacatttcattggagcacgaagcgaaagtgtctaaagtatctgaagagcagctcttctacttgatgagccgcggtatttctgaagaagaagcaactgaaatgatcgtaatgggctttatcgagccattcacaaaagagcttccaatggaatacgcagttgaaatgaaccgtttgattaagttcgaaatggaaggttctattggttaatgatgaaaactcctttgtttatcaaggggtttagagatagtttttaaaatggccggcgtgccgaatttgattgtagaagacgaacttttgaagttcgtcttcttttatttttcagagacatatccactgttattttaatggttttaattccttatcgattagaatatttcagacctgcgccggataggttcagtttctatatcacgcaaccatacagttgcttatacttgacatgcaactaatgagttgcttatactcaatatatgaattggaacaaagacgctatattcaaagcactcggcgattcgactcggcggcttatattagacgaattatctgaacgcaacgagctgacgttgtatgaacttacgatacgtcttattacaaagtacgacctttctattacgcgacaggcgatagctaaacacctttctgtactggaggatgcaggactcgtaacatcaaaacgaaagggaaaatatcgagtacttatattcaacaacgaaccgcttaaaaatttgctgaaaggatggatagaataattttataaaatcagaacagggcctctgataaatgtgtgggttgttttgcttgtagccagattgttagcatagtaccatgcttcattcatatcgaaggagggaaaaacagtatgaaaatcgttgttaccagtatatttgtacaagatcaagacaaggcactgaagttctatacagaaaaactggggtttgtaaaaaaggaggatgttcccatggggaaattcaggtggataacgcttgtttctccagatgatcaagacggaaccgagcttttactcgaaccgaatgaacatcctgccgccaaggagtatcaaaagaagatattctccgaaggcttcccggccacaatgtttggcgttgcagatattcaaaaagagtacaaccgattaaaggaaaaaggcgtgacgtttacgatggaaccgacaaaaatgggcgaagtcacaattgctgtcttcgatgatacatgcggtaaccttattcaaattgtacagaagtaaccgattcagtcacgtcctttttgtatgcagaagaaaaaccgctggccgaggggccgcggttttttactcttcttctgtctcttgattgataatttgctttacagatgatctgctgttattttctctgttcatctctcgcaattgagtataagccatatcgaattcctcttttgtcatctgctttgcggctaatgcagagcataatatagcaaaagcaattggcattgtatcaatgtgaatgtcgatatggacctctgagttgccgctgtttttgataacagattcagtagtgggtatctcttgagtatgtctgttgagaggaatgatgttttcgttcattagtcttctccgtcttgtgactgcgcctgtgcctgatcctgatctgtattcacgttgaccacgacttttgcattaccgctgttttggacttttgcgactgccgcatcgcgtctgttttcttcattttcatgacgattttcgctcatggtatcatcctttctctattgatagtgacaggatattcgttaggagagtaaagagattggacgaacttcgcggtttttccacattagggcaaaaggtcgaaggaaagcattctatttggtaaaatgaatagacattataatagaaaaggtgtttgcatatgaaatcgtacatcatcgtcggcgcagggattctgggcgcgtcgacggcttatcatctcgcaaaatcaggcgctcgcgttactgtcattgatcggaaagagccgggacaagcgactgatgcggcggcggggatcgtctgtccttggctctctcagcgccgcaatcaggattggtatcagcttgctaagggcggggcgcgatactatccggatttaatcaatcagttggaagaggacggagaaacggatacaggatataaacgtgttggtgcgatcagcattcatactgatgcgtcaaagcttgataagatggaggagcgggcgtataagagacgggaggatgcgccggagatcggcgacattacccgcttgtctgcaagtgaaacgaaaaagctgtttccgattttagctgacggctatgaatcggttcatatcagcggtgccgcccgtgtgaacggaagagcgctgtgccggtcgcttttaagcgctgcagagaaacgcggcgcaacggtcatcaaaggaaatgcgtccttgctttttgaaaacggaacagtcaccggcgtgcaaacagatacaaagcagtttgcggctgacgcggtcattgtgacggcgggagcatgggccaatgagatattgaagcctcttggcattcattttcaagtgtcatttcaaaaagcgcagattatgcattttgaaatgacagatgcagatacaggatcgtggccggttgtaatgccgccgagtgatcagtacattctgtcgtttgataacggcagaattgtagccggcgccacacacgagaacgatgccggtcttgatgatcttcgtgtgacagccggaggccagcacgaagtattgagcaaagcgttagccgttgcaccgggtcttgctgatgcggctgctgttgaaacaagagtgggcttcaggccgtttacaccgggttttctgccggtcataggggctgtgccgaatgttcaaggcctgtacgctgctaacggtttgggcgcttctggactgacgatggggccgttcttaggtgcagagctcgcaaagctagttctcggaaagcagacagaattagaccttagtccttatgatccagccggagcacttgcataataagcaagagcatgacaaacaaatataataaagctgttctagcttttcttttctgtatgtgttagcatttatctttaatgaaaaagaggacgtgaactgattttgataaaaattgatatacccgcaccgaatgtcaccatcactgaacgacagcagtcagctaatgataacgagccgaagataaaaccgattcacggattcatcgactttcaccagatcccaagggacaaaggcggcatttttatgttttacaacattcatgacgagctgctgtttgtcggtaaagccagaaagttaagacagagaattaagaagcatttcgaagacactgtttcaccgatcaaacatcacagagatgaagtctataaaatcgaggtatgtgtagttgatgatccaatggaaagagagatttacgaaacatatatcatcaatacacagcactcgaagtacaatatagacaaggtattttttaaataagacgtcagtctgcggattgaacagcgaagccagagcttaagtcaagttctggcttttgatttgggcattttttcgcatatagtccctttgtctgtcattcgaataaattattgagaaatttcagaaaataatattgacaatcctatccacggactttaatataacaatatataatgttatataacgttatataataaaaacagggagtgaaggatttgagtcaggccacagcaaaagtaaatcgtgaggttcaagctttcttgcaggatttgaaagggaaaaccattgatcatgtattctttgtcgcatgcggagggtcttctgccattatgtatccgagtaagtatgtgtttgacagagagtcaaaatcaataaactccgacctctacagcgccaacgaatttattcagcgcaaccctgttcagcttggtgaaaagtctcttgttattttgtgctcgcattcgggaaataccccggagacagtcaaagctgctgcgtttgcaaggggcaagggtgcacttacgattgcgatgacgtttaaaccggagtctcctttagcgcaggaagcgcaatatgttgcccagtacgattggggtgatgaggcgcttgcgatcaatacaaactatggcgttttgtatcaaatcgtttttggaaccctgcaagtattagaaaacaatacgaaattccaacaagcaattgaaggcttagatcaattgcaggctgtatatgaaaaagcccttaagcaggaagctgacaacgccaagcaatttgcaaaagcccatgaaaaagaaagcattatttataccatggcaagcggtgcaaactacggtgtcgcttactcctacagcatctgcattctcatggaaatgcaatggattcattcccacgccattcatgccggagaatattttcacggaccgtttgaaattattgatgaatccgtgccgtttatcatcctgctcggtttagatgaaacaagacctcttgaagagcgggcacttaccttctcgaaaaagtatggcaaaaagctcactgtgcttgatgctgcatcttacgacttcactgcaattgacgattcagttaaaggctatcttgctccgctcgttctcaatcgtgtgctgagaagctatgcagacgagctggcagaggcgagaaatcatcctttatctcatagaagatacatgtggaaagttgagtattgatctgaaaatgaggaaccattatgcattagactataatgttatataacattatagtctaatgtccagaggaggccaaccctttgaagaaaatgttgttgttcttgatcattgcagctgtcagtatgttcaccattgcaggctgttcgagccaaagcagttcagcggacggaaaggtgacattgaaatttttccacagatggccgaaggagccggaaaaaagttattttgaagaggttgttaaggaatttgaaaaagaacacccagatatcgatattcaaattgaagccgttttaaatgactcctataaagataaaattaaggtcatgctgggaaccaccagccctcctgacatttacttctcttggagcgatgagtttgcttttaaatttatcagaggcaataaagcacttgatctctcgtcctactacaaaaatgacaccgattggtcatcacagctcgttcaatcgcaaattacaccatttacttatgaaaacaagcaatatggcgtaccgtggcaaatggacgctaaatcattcttctataataaagacattttccaaaagctgaatcttgatcccccgaagacgtgggatgaattaatcgatgtgtcaaaaaagctgaaagaacatggctacacaccgatcagctttggaacaaaggcgacttggacaatctcgcactatatcggcacgcttaatcagcggatggtcgatgaaaaaacgcgagacaaggactataacgccaaaacgggtgaatttactgatgaaggctacgtaaaagcacttgaaaagcttcaagagctgatgccttactttaataaacatgtaaactccgtcgaccacgaatatgtgagacagcaatttaagagcggaaagtcggcgatgatatatgcggaaacagccgaaatcaagctggttgaaccggttaatcttgggatgttcccatttcctgaaatcagcgggcagaaaggatcttcagaagcgttaacgggagcgccggaaggattcatgatttcctcaagaacaaaacatccgaaggaagcaatggaatttttgcagttcttgacgtcgaaaaaaatgggcgaaaagctcgtgaaagatgtcgggaaatacagtgcagtgcaaggtacggctactgaagaaaatgcaacagccattcagcgtgaagccgttcagcatattgttgatgccaaatcaatggttccatggtttgatatggatgtcgatgttgaagtcgcagatgcgtacctaacgggcgtccagcaaatgcttggcggcgacatgacaccgcagcaggtgatgaaagccgttcaaaaggcagcaaagcaggtgagggcgtcagctgaataaatcaaagaaaaggtgaagcttcgcaccttttctttttataaaggagatgagatacccttggtcaatcagaataaaataatcccctatttgtttttggtgcccgctctcgtttttttacttttcgtttatatcccgatttttgagaatgtattcctcagcctgtttcagtggagctcattttctccggaaaaaacgtttatcggcttaaaaaactatgttgaattatttcatgatcctgtcttctatcaggcacttaccaataatgtgctttatgcagtgatctcaattgtatgccaggtatttggcggtttgattttggcggcggtgcttgaggataagctggtcagaaaatggtcgccgttttttcgtaccgttttctttttgccggttgtcatctcaatgacggtgatcgcgcttttgtttgattttatttacaatccggagacagggcttttgaatcagctgcttcaggccatcggtcttgatcagctgacgagggcctggctcggggatgacagcacagctatgctttctgtcatttttgtgtcccagtggcaatctgtcggttatattgcgatgctgtacatcgtgtcgattcaaaaaataccggatgaactgtatgaagcggcccggcttgacggcgcgggtaaaattcagcagttttttcatattactgttccccagacgaaagagatgtcttttgttgcggtggtcatgacgctgaccggggcctttacggtctttaatgagccgtacattttgacaggcggcgggccgggaaacgcatcagaagtcttgagcacgtttttatataaaagcgcctttacaaaggatatgatgggctacgcctcagcgattgccactgtcgtgttaatcattacgcttgcattatcgctcatgcaaatgaagttctttaaaaccggaaaggaggagtaactgatgctgcctcagaagaagacagattcgttcagattggagcctgtgcctgaccagcacattgaggttaaagataagcctagacgaaaatggtatatcggagaaacgtctgtgtgggtttttctgtttctttatctgattgcgattgcctatccgcttctctggatggtgatgagcgcctttaaaaactctgacgatatttttgagcacagctggtcgctgccgtcttcgtggcatccggaaaattttgtttccgcctggaaccaggggatttcttcttattttatgaacagtgtcatcgttacggcgctgacgtgtgtgatcactgtctttatcagtgcatgggcagcgtatggtctttcccggtttgagtttaaaggaaaaggattctttttggtgctatgtcttggcggattgatgctgacgccgcaggtcagtcttgtgccgctttattctattattcagtcgcttggcctgtacaatacgtattgggcgttaatcctgccgtatgcggcttatcggatcccattcaccatcattttgatccgctcttattttctttctatacccaaagaattggaggaggcggcctatttggatgggtgtacaagttttggagtatttttcagaattttcttaccaatgagcgtgccaattttggtgacatccggcattttgacggcttaccatacatggaatgagtttatgtttgcgattattttcatagatgatgagaatttgcggaccattccagccgggctgatgcagttcagagacgcgctgcagacagactggggcgtcctgctggcggggttaacgatttcagccgcgccgattattattctatttttattgatgcagaaatattttgtccgcgggattgcaagcggcagtgtaaaaggataaaggaggaagcgctatgaaattgattgcggttggagataatgttgtagattattaccaggatcaagaaacattctacccgggaggaaatgccttaaacgttgctgtgcttgccaagcggctcgggcatgagtcttcctatatcggaatcgtcggcaatgacgaagccgcggcgcatctgttgaacgttctcaagctggagcaggtcaatgcagattatatccgccaggcgcacggagaaaacgggatggcgattgtcacccttgatgaacagggggaccgcatttttgtcagatcaaataaaggcggcattcagtcccggcttcgcctcgcgtttcaggagaaagatgtatcttttatcagcgggcatgatctgctgcatacgagcgtgtacagcaggcttgagaacgatcttccgcagctgtgcgggctggtcccggtctcatttgatttttcaaccaatcgggaggatgattatttgaggagggtctgtccttatgtgacgtatgcgtttttttcaggaagcgatttgagtgagtcggaatgcggtgagcttgccaaaacagctcatgggtacggagccaaaatggtttgtatgacccgagggggccaaggagcaatcctgtctgcgggtgatcgagtctatcatcagccgattgtggaagctgatataatagatacacttggagcgggagattcttttatagcaggctttttgactgccttttgcgtgaagcaggatataacgtatgctttgcgccaggctgctgaaacggctgcgaaaacttgcggtgtgtacggagctttcggctatggctatccttatcgcttggaggacgggggaagcagtgaaaaaacgagaatactataagcagtgtctcgttttttatgcctgttatgtgtaggggctgttgatggtaaaagtgacacggtttgtgtgcatcaaaaacaatgagcaatagattggctggtcgtttgatgtaaaagccgttttatcaatttcaaacagcgcatccccgatatcacaatccaggtatttgctttcctcctgttgggcatatacaacgtttaatagcttcgtattgtgcgtgggtacaactttgtattgctgtttcaaaatatcatgcatggagacgccgtcagcaataaaggtatcaatgccgggaaacaaatcaagcggataatgcgtcacttcaaaggtgagaggctgatcatcattatataaaatccgttttaattcaaccacagggctctcgggttggatttgaagcttttcggcgatgggttttgacgctggaatgatgtcatgggacagcacatgatgcttcggttttttgccggttgattccataaattccgagtagccgtttacagcgatcagctctcgttttaatttagggcttttaacgaacgttccctttccctgctgcctgatcagatagccttcttcgactaaatcgagaatggctttcctgacggtgatgcggctgacgttatacttggtgcaaagctcgttttcggtaggcagcttggcagttggggaatacacgccctttttgatgtcatcagtgatgatttgttttagctgaatgtataaaggtgtagaacttccgttgtttaacaaagggtagcctccttttaacctattatttatattataatgtattatgacgttataatacaaatttacattttttattttagaaatatagcaaaaatgggaatcgattactctaaaaataacagaaagaccaagttgtttccagtgacgaaataacgggtcaaaagatagggggacttttctgatggcttcattaacatttgaacacgtcaaaaaatcatatcactcacaattaaccgtgaaggactttgatttagatgtaaaggataaggagcttttggtgctggtggggccgtcaggatgcggaaaatcaacaacgctgcggatggtggctggattagaaagcatttctgaaggaaatcttcttattgatggggagcgggtcaatgatcttccgccgaaagaacgtgatattgcgatggtattccaaaactatgcgctttatccgcatatgacggtttttgataatatggcgtttggattaaagctcagaaagatggcgaaacaggaaattgccgagcgggttcatgcggcagccagaattttagaaattgaacatttgctgaagagaaaaccgaaggcgctctccggcgggcagcggcaaagggtggcgcttggcaggtcgattgtgagggagccgaaggtctttttaatggacgagccgctttctaatctggatgcaaaactaagagtgacgatgcggacagaaatcagcaagctgcaccagcgattagaggcaacgatcatttatgtcacgcatgaccagaccgaagcaatgacaatgggagatcggattgtcgtcatgaatgaaggggaaattcagcaagtggcgaaacctcatgacatttatcgttacccggccaatttgtttgtcgcaggcttcattggctctcccggaatgaactttttgaaaggcatcatagaacagcagcatggcgagcttttttttacaaattcttcgatccggcttcatattcctgaagaaaaagcaaagcggctgaaggaaaagggatatgccggagaacagatgattgccggtgtacggccggagcacatcacacaaatgacaggaaatgaccagttgtttgattcagtgtttcaagcgaacgtggaagtgaatgaaaatctgggctcggagctcatagtgcatgtcatggctggggacgagcgactcaaggtccgcctggacggaaacacgcgaatcgatgcaggcgattcaatccagctctcagtgaaaatggaccacgtcgtctttttcgatgtggaaacggaagaggctgtgtattagaaaaaggtgctcctaaaaagggcacctcagcgtgtcgacaaaccctcgcattcgttgtcaggactgcgcttcggtgctcacgaattagaacattcgctccgctcctatgctcgtccttcctagtcttcaagggttttggcaagaatctgaggtgctcctaaaaaggagcacctttttcttacggccaaatctcatccgcccattcagggtggtcgataaatggattgcggttgtgctgatatttttcataaatgatttcatttcttttccgctcgcggtcgtcaaccggatcctgcttattccattcgagcaggacagattgtttgccatgataaggagctgagccgttgcctgtcttatcattaagctcaagatcaggatagccgtcatcaccctcgtaacggacagccatgtaaaacagcatgcgggcaacatcgcctttcacatcatcgcggggctcccatgaatcgccgtcataataatttccgggtgccttcgcatattcagtgccgccattgtcaaaatccatatttcctctggcgctgttaacttgaacatcagccgggcgcaaatgatgaatatcagtaccaggtcccttgctcgtgccaaaatcgccatgggatttcgcccagacatgctcgcggttccaatcgccgacattgccgccgttcaggtttttggaccgcgattcattcgtatagagcaggatgacgttattcggatttctcggatcttcatccgtttctttcagcgcgttccacacttcgctgtaggacagcatcgtgtgtccgctgataatacggtgcagggtgctttttagcgagtctcctgttttaccttcagccccttcataataggtatctgtgtcagcatagggtgcagcgggggcggctaatgagagaaggcttcctgttcctgaaggggaagacgccaatcggtcattaaggcttaatgcggtttgcgcgcttgctgaagctgccggtgcaagccatccggaaatcagtaatagacagacgagcggcagaaaccatgctttttttgtcatcacttgccctccttttatcagatcatgtctattatctaaaattgaaataaaggatagaagtgtcattttgtatatttttcattaaaattgtaaattagtccctttgaaggaggcggaaatctcctgttccaatatctttaggtcctgtttttgcgagctgccggcatttccgctttcatctgttccgcaaacatcgcctctccggcaagctgagcttgttcatatgaaaggcattttgaccctctctttcactcttgctggctctcttccttaccgtgttttcttttgacctttacatcaaaatagttgtgacatgtagggtgaatctggttgctggatagatactgtgaccaaaaaataaacgtttttttagttaatctgtcaatgaactatcatgttcctccttctataatgaagtcaccatagcggccagaggggggagtacatggaaaagcagaagctttcggtaaaaaacagcatcacagattatattgaatggctcgcccaatacggtgtgtctgcggatggcggcgtaacgaggcttttatacacaaaagagtggatggacgcacagcttgccgtgaaaacggaaatgtcttctttcggacttgaaacaagattcgatgatgtcggcaatgtgtttggaaggctttcaggcacccagtctccggatgaagtcattgtaaccggttcacatatcgatactgtcatcaatgggggaaaatacgacggcgcctatggtgttctggcggcaatgcttgcgataaagcggctcaaagagacatatggatcgccgaaaaaaacactcgaagcggtatccttatgtgaggaggagggcagccgttttccaatgacctattggggatcagggaatatgacgggggttttttcattacaggatggagcagagccaagagacgaatcaggagtctcgctgcaacatgcgatgcatgagaacggttttggcaaaggtgtgtttcaggcagcatatcggacagatatcagcgcgtttgttgagctccatattgaacagggacagacattggaaatgtcaggacgggatctcgggattgtgacaagcattgcggggcagaggcgctatctcgtcacgctggagggggaatgcaatcatgcgggaaccacctccatgaaatggcgcaaggacccgctcgcagccagcagccgtatcattcatgagctgttgctgcggtcggaggagctgccggatgagctccgtctgacatgcggaaaaataacggcagagcccaatgtagccaatgtcataccgggccgcgtccagttttcaatcgatattcgccatcagcatcagcatgtgctggaacagtttcatcaagacatggttgctttgatcaacggcatttgcctacaaaaaggaattcgcgctgtgattgatgaatatatgcggatagagcctgtgccgatggacgaaaggctgaaggctgcggcttttgaaacagcattagaaaacggcttcagctgtgaggaaatggtgagcggagcagggcatgacgcgcaaatgatcggaaggcgctatcctgcttgtatgctgtttgtgccgagccgaggcggcgtcagccactcaccgaaggaatatacgtcagccagacagcttgagatcggcgtccgcgcactgactgatttattatacaaactggcttactgataaaggaggaatggctgtgtcaggcagaagagaattatgcaccccgttaagaacgattatgacaccggggcctgttgaggttgatccgcgtgtattaagagtaatgagcaccccggttgtcggccaatttgatccggcgtttacaggtattatgaatgaaacgatggagatgcttcgggagctgttccaaacaaaaaaccgctgggcatacccgattgacggcacttcacgggcgggaattgaagcagtgctggctagtgtgatagagccggaagatgatgtgctcattcccatttacggccgtttcggttatttgctgactgaaatcgccgagcgatatggggcaaatgttcatatgctggagtgcgaatggggaacggtttttgacccggaggacatcatacgggagataaaaaaagtgaagccgaaaattgtggccatggtgcatggagaaacatcgacaggacggattcacccgctgaaagccatcggcgaagcctgccgcaccgaggatgcattgtttatcgtcgatgcagtcgcaacgattgggggctgcgaggttaaagtcgatgaatggaagattgacgctgccatcggcggaacgcaaaaatgtttgtctgtgccttcaggaatggcgccgattacatataatgagcgggtggcggacgtgattgcagctcgcaaaaaggtagaacgcgggattgcgacacaagctgacagtgaagcgctttcgggaaatcggccaatcacaagcaactactttgatttgagccagcttgaggattattggagcgaaagacggctcaatcatcatacagaagcgacgacgatgctgtacgccttacgtgagggagtcagactggtgcttgaagaaggtcttgaggcgcgtttcgagcggcatcggcaccatgaagccgcattagcagcagggataaaggcaatggggctaagattgtttggagatgacagctgcaaaatgcctgttgtcacctgtgtcgaaattcccggcggcattgacggcgattctgtccgtgacatgctgctggcacaattcggtattgaaatcgccagctcattcggcccgctcgcagggaagatctggagaatcggcacgatggggtacagctgcagaaaagaaaacgtgctattcgtgcttgccgggttagaggctgtgcttctcagacataacgcaggaatcgaagcaggaaaagcgctccaagcagcgctgaatgtgtatgaaaacgctggccgccaggcagcggtgtaaagaaaagcttgcggaactccgcaagctttttagatatgatttcgtgttttctccaatctaattttcttcgtttgactctttttacaaatcctctttctatgtgtttcattttctgacaaatcatgagtcattttttcttccatcgtctattctttatacaagttacctataaaatcacgctgaactagttgtttctcacggcaattttcgagaggaggatgcggcattggggaattttcacacgatgttagatgcgctcctggaagaccaggaggaggctgtactggcgacaattgttcaagtggaaggctccgcgtatcgaaaagcaggcgcctctatgctctttaagaaaaatggcagacggattggcttgctgagcggcgggtgtgtggaagaagatgtattccaaagaatcagtgcgctgggcgatcagctcacaccaacgctgattccctacgacatgcggtcggaggacgatctttcttggggcatgggagccgggtgcaatggcattattcatgttcatgcagagcgaatcactcaggaaaaaaggcggcactatgagaaagtgagggactgccttcaatcaggcaaagctgtcacttccgttacaaagattggatcctcccattatttatttctgacggagaacgggcattttggcaactggccggacgcgcctctgcaagatattcaacgtactctttcaacgcttcatttaccgcatttcgatccacccactaacatgtttattcagcgaattgaaccgaagccgcgcctcattctgtttggggcgggtccggatactgtaccgctggccaatttggcggctgacacagggttttctgttatcgtgacggattggcggcccgcttattgtacatcctctctttttccaaaagcggatcagctgattaccgcttttccggaacaaatgcttagcaaatttcaattttttccgcatgatgcagctgttgtggcaacccatcattatcagcacgatcaaacgatcatcaacttcttattttctcaaaacctccattatattggactgttgggttcggcaaaccgcacgaaacggctgctgaacggaaaacatcctccgtctcacttttacagtccggtcgggctgaaaatcggtgcggaaggtccagaggaaattgcggtaagtgtagttgcagaaatcattcaaacaagaaaacggatagcggttgtatgagaagcccctatctgatcggcgtgtttctcgctgccggcaaaagcagaagaatgggccaaaacaagctggctttgccgctaaaaggagaaaacataggctcactttctttgaaaactgctctgtcgtcccgccttgatcacgtgctggtcgtcgagcggacagaacatgcctcccttgagtggataggagcgccgtatcacgctccgccttttcaaaaacgctggagcctgcacgtttgccaagatgcagaaaagggtcaggggcattcagtcagcagcggggtgagaaaagcagaaagcatgggggcggacggcgttgtcattttgttagccgaccagcctcagctttccgtcgatcatctcaatgcccttgtggctctggctcctgagtcatttgccgtgtcatcgtttttaggggcgttgaccccgccaatctacttctcgtcggcttgttttccttatgtaaaggggttaacgggagatgaaggggctcgcaggctcctgaaaagcggacagcttggagcaggagtggttttggaggcaaaggatagcggtgagttggacgatattgatacacccgaggaatatgacatggtaaggagggcgatggcttgaacggccaagtgacaaaagcaaggatgaatattcaattatggaggccgacagcgcttgatgaggcctattcgcttttagagaagcttgctccggatgtgtgtgccgcatcgggaagcacgctgcttcagcttcagtgggacaaaggaactctgccgaaacagcaccttgtcagccttgaagggattgacgagatgcgagggatcagcgccagtgacacccacgtgtcgatcggggcactcacatcactgaatgaatgcagaaagaagcctttgatcaagagagcgcttggctgtttcagtgacgctgcttccgctgtcgctgcaccggggattcgcagccgtgccacgattggcggcaacatagcgagtaaaatcggtgatttcattccgcttctgcttgtgcttggtgctgagcttatcgtatatcaaaaggagctcatcaggctgccgcttggcgcttggctcagtgaggaagactttagaacggctatcgtcacgcgtgtcatcatcccgcgggcggagggagagcgtgtattttatcacaagcttggtaggcgccaggcttttacaggagcggctgctgttgcagctggacgttttttgaaagacggcagcattcgtctcgccgctggccatgccgatatcactcctaggagattattggacagcgaagcgaaatggatggcaccagggtgggactcgcatgagctgtacaaaacacttatccatgagctgccgttttcctcagatgcttttatgtcagcggcatacagaaaaaaagccgctgccaacgtcatcatggcagagctgatggctgagggaggggaataaatgatcatcaataaaccgtcaagagtcaggccggatggaagggataaggtcacaggggaattgaaatatatgaccgatctcagctttccgggaatgctgtatggcaaggtgctgagaagtgcttatcctcatgcagagattgtgtcggtttgcaccataaaagctgagaaaatggaaggcgtgcaggccgtcgtcacacataaagacgttcccggcttaaaccgatttggcattgtcatccctgatcagccggttttatgtgaggacagggtgcggtatgtcggggatgcgatcgccgcagttgctgcggaaacggaagaaatcgcggaagcggcgctggagctgattcgagttgagtataaagagctggaagtcatggattccccagaaaaagcgattcggccgaatgcgcaaagactgcatgaggacgggaatatcctgcaccgcgcatttttttcaaacggcgatgtggaagaagggtttcaagcatctgacacagtccttgaagaaacctatgagctgccgcggcagatgcatacgtatatggaaacggagggaggcgtagccgttccggaagacgacgggggttttacgatgtatgcaggaacccagcacggctataaagaccgtttccagcttgcccgtatttttgacattcctgaagagaagatcaggattgtgtcaagtccgatgggcggctcgttcggaggaaaggatgagctgaatattcagccgtatgccgcgcttttgtcactgaaaagcggacgtcctgtcaaaatccatcagacacgaaaggaatctgtacgttctggcattaagcgccatccgatgaagattacgataaaaacgggtgcggatcattcgggaaatctattggcgcatgacgtgaaaattgtggcggacacaggcgcatatgctacgctcggaccggctgttcttgatttttctgtcgagcatgccgcggggccgtaccgtattccgaatatccggactgaaggaatatcagtatttacgaacaacggggtggcgggggaatttcggggctttggcggcaaccaaatcacatttgcactcgaaacccatctcgatcgtctcagcggcatgctcggcatcgacccgctcgagctgagaagaaaaaatatcagaaaaccgcatgacttggggcctcttgagcatcggattgcaccgactgacggagcggcacaggtgttgaatgccatatctaaatctcccattcttacaagaaccagccggaactgcgggtatctgcaaagaggcacgggagcggcaattacaatgcacggcggcgggctggggtttggccgaatggatgcggcaggaggccgtttgtctctttcgagtgaaggcaaaatcactgcttcgtttggatttgaagaatgcggacaggggattctagcagcgattgaacagattgtcatggaggagttaggttgtgccgcagaggatatttccattgttattggggataccgcaaaagtgccgaagtcaggctcctccacagcatcccgcggcacaagcatggtgtggcacgcgatccagcgtttgaagaagccgtttctatctcagttgaaaaaacgggcggcagaatggagcggctgttcagcggaaaaccttattcccggcgctgcaggcttgcgtgacaaaaacacaaaggcgctcgtagttacgtataaggagctggctgaaaaaggccctttggcagaggaaacggcctttgactttccaacaacgcctgaccctgtggtgggcggccatttcctctactcatttggagcggctgccgttgaggtggaggtagatctgttaacaggcgaagtcaaattgatagattgtgagcacgctattgcggcaggtccggttgtcagtccgcagggatatcgaggtcaaattgaaggcggcgctgccatggcactcggctatacgctgatggaggaagcgaaaatgacggacggccgttatgccgcagaaaatctagatcactatttgatccctggagtcaaagacgttcctgacatgaaggtgatcgcaatagaagaactaatgaagggtgatgcatatggaccgcgcggtgttggcgaaattggaacaatcgccatcactccggcgattgtaaaggcagtacatgatgcggtcggatgctggataaacaagctgccaatttcaagagaagagctgcttgaagcgatcgacagaaaggggctgaagcaatggacgtaaaagaggccgggccatttcctgtaaaaaaggaacagttccggatgaccgtgaatgggcaggagtgggaggttgctgccgttcctacgacacatctgagtgacttgcttagaaaggaatttcagctgaccgggacaaaggtgtcctgtggaatcggccgctgcggagcctgctctattttaatcgacggaaaactggccaatgcgtgtatgaccatggcttatcaagtggacggccactccattacaacaatcgagggcgtacaaaaagaggaactggatatctgccaaaccgcttttctggaagaaggaggcttccaatgcggctactgtaccccaggaatgataattgcgcttaaagcactgtttcgggaaacccctcaaccttctgacaaagatatagaagaagggctggcggggaacttgtgccggtgtaccgggtatggcgggattatgcggtcagcttgcaggattagaagagagttgaacgggggtagtctggagtccggcttttaagagccggacttttttagcctcagtcagacagcgcgatcaagtcgcagaagcgttgtgggaaaacacacgataaatctcgtagaacttgacagcttctggattagaaaatgattagtgaatccatagcaaagacgccataaaaacttcttatggcgtctgtcggacagggaggtgttggatacggcggaggcaaggaaagttaaacttaataattaaagatagctgctccaacaatgatcaacaaaatgaatagcaccacgatcaaagcgaaggagctcccgaaaccgtttgagtaaccagagtttccactgtatccaccagaattgtagaatcccataatgtcacctccttagtggagatagtataagatatgccaacgatcattttcgacatagatttaagtctaaaaaagaaaaaatgaatattttgtctaaaggtgtaagagagaacgcgttatcaaaactattaaaaacgcagcaattgtcttcagagtattttttcgagaaaaaacgcggtctgtttataggattggagaagggagctcggctgctaagagctgacttattagtttgaaacctcgatttataaatgaaaggactacaggatatttttctcgtaggcaattatcctgaaaaatataggtgaatgtttattctagctgttgtttcactaagtgtggggatcacttcaagtactgtcctaggatcaaaagtttattgaagtgcaaatagaagcccgccggtgaggcgggcttccttcttaactccccctatacacctgataaccaaacggcgacagcaagagcgggatatgataatgtgcatctggatctgctagctgaaaacggacggtgactatggttaaaaacggctggtcgaccgtattcacgtttttattcgcaaaatagtctcctgcatgaaattccatcacatactctccggaaaccagctcttcaccagccagcagagggacattggctctgccgtcattgttagtgtaaacctctttcataatactttcgcccagccgcttcaattcaatttttacgttcgccgctggtttgccgctggttaaatctaaaatatgggttgtcagttttcccatcaggctttcaggctccgacatttttcagcggctttctgtttttctttctcggcgtcttctcttgtcacggtaaaatgttggaaaccgtatggcgggcgcggttcggtgtagacttttccttttgagcccgggatttcttcgacaaccgtatcccacgtgtgattttgagattggaagctgacatcagtgagctgcgggaacctcgctaatattctgcagccgatatgatagattaagttttggattgaaggggtttcgagctcgtgaaaaacggtgctcgccaagtcgcggacttgttcagccgcgacgtagcgggctggatcaaaagcgtatgcgtcattggtattttcatattgccagctgatgtttaaatagacaaacagcgggcggttgccgtcttcggggagagtcgtatattcgtcccggatgaagccgacgaaggagttgccgctcaccttgacgagctgaagatccatgatttcgctgtattgctctgtaatcgttatggtattcccgcttcgttctgctttcagcacagagcggcttcgttcattacgcgatcttctgaagacgaggcggcttgtgctgagctctttctcctcgtatgcaggcattgcttcaaacggaatgtcttcgccagtcagagtgatcgtgtccatatgagaataggtatctaaaaatcggtgagctacatagtgtaggaacccctcagttgtcgttccttcataggatgcgagatggcgctggataaagtttttcattgaatccgttgccacgacgagagtgttgtctccgtctgtaaatgatggcaggaaggcttctccgccaatttcgcatgtcacatcaacgccgacaacggtattatctcttccggcaaaagatgattccgggatttgcttcactccagtgagcggttttaaatacgttcggtatgcaaatacatttcctttgccataagacatggttcttttcatttgcgtctctcctttttcagtgatgatgtcagccagacgaaagcgggcgattcggtaaatttctataagggcctgctggaactccgtttctcgttcgctctcaagccttgccagcagggcttggtgaatgtcctgtttcgtctttcccttcaccgctaaaataaaaggaaagccgaagcgatcataatagtgttcattcagcatgagaaactcctcgtattcctgctgttctaatttgccgagccctgcgttctgctgctctcgtaccgagtcatcgctcattgttttctttgttccgagccggggatgctttttgattaaatcaagctgtgtctcgcgatccgcagcttttacaatgccagtcattttgcggtgaagatcagaaagggacgaaaacggccgtagtgctgcggatctctccgcaatccatgaagagtgttcaaaaatagagccaagtgtgtctgtcagtgtttgtgtgtccatttggttcaggtcatccattgtgaacattggcatcttcctttacgtttttatgtctgcgctattcggctgtttggtttgaaaaaaagcgtgcagtgcaatggccgtcaaactgccgatcacaattccgcttcctgccaagacagaggccgcgcccgaaagagatgaaaacaacgcgggaactgttgtagcgccaagccccaagctgacggaagaggcgataatcagcaggttgccttgcgaatcaaggtcaacgctggatagcattttgatcccgtaagaaataaccatgccgaacatgacgatcattgcgccgccgagaactggggtggggatcactgttgtcagggccgctgcttttggaaccagcccgatcgcgaccagtatgattcctgtgatggcgatgacgttgacacttttcatctttgagagctgaacgatgccgacattctgcgagaaagctgtatagggaaacgcgttaaataagccgcccagcaaaatcgcaaggccttctgcccggtagcccttttccagatccttctccgacagcctgcggtttgtgatatcagcgagggcaaaataaacgcctgtcgattcaacgaggctgacaatcgcaacgagaagcatcgtgacaacagccggcagctcaaaggttggcggtccgaaataaaacagagacggaacatgaagccaagacgcttccaagacctcagaaaaatcgacctttcccatcaaatatgcagccgttgttcctgcgataagactgagtaaaatcgctatggagcggataaagcctttaaagaaataaaatagcaataagataaaagctgtgacgccaaacccgaggagcacgttgtcgagtgagccgaattctttgcttccttcacctccggccaggttattcattgccgttggaatcaggctgatgccgatgatcatgacgactgatccggttacgacaggcggaaaaaaacggacaagcttcccgaagaagcccgcggctaagacgacaatcagtcctgcggcgataatggcaccatatatcgctgggacaccgtaagtgcttccgatggaaatcatcgggccgactgcggtaaacgtgcatccgagcacaacgggaaggccgatgccgaaatatcggtttctccagagctgcaaaagagttgccgccccgcacataaacaaatcaatcgcgattaaatacgtcagctgccccgcattcagcccgatcgctgctccgacgatcaacggaacgagaatggctcccgcatacatggcaagcatgtgctgaagccccagcatcattagctgtaaggcattgtgctgttccttcatcttttttacacctctttttctaatgcgagtgtatgttctaataccggaagttctgtttgctgtgctgttaattcttttttgtcgcgcaagctgaaaaatagattcaaaaagatggcggttaggcttccggtgatggtgccgtcactgaccagaatccggatcggagcggggaattcagcaaaaatcccgggggccgtgctggcgccgatgccgagtgcgattgagcatgcgatggtcaggaggtggtattgatttttgagatccgctgtgctgagcattttgacgccggaggcaatcaccatgccgaacatgacgacggtcgcgccgccaagtacagcagcaggaacggcagatgcaagggcggcaatcttcggaatcagtccgagacagacaaggatacagcctgcggtaacgacgatgtttcttgttttcactttggtcagctgcaataagccggcgttttgcgcaaaggtattataaggaaaggcattgaacagcccgccgatgagaatggcgattccttccgctcgatagcctttgacgagatctttgtcagttaaaggtctgccgcatatctttccgattgcgtaaaaaacgccggttgattccacaataatgacgattccgacgatcagcatcgttaagatcggaccgatttcaaacgcaggggctccgaagtaaaaaggcttcgggatttggaagaacggtgcttctgtaacagaagaaaagctgactttgcccatgatcgctgctgccgctgttccggcggcgatgccgatcagaacggatagtgttcgggcaaatcctttgagaaagcggttgaggactaagatcagaacaaggacaccgacagagagaagaaggttttcgagcgaaccgtattcggggttggcgctgccgtttattttttcgccgccagccatatttttcacacctgttggaacaagtgaaaggccgatcaaggtcacaacggtacctgttacgacaggaggaaataacacagtcagcttgccgaaaaaacgcgcaaacaaaaagatgaacacaccggccgcaatgatggaaccataaatcgcgtgaatgccgtaattgctgccgattgcaatcattggggtgacggccacaaatgaactgccaagcatgacgggaagcccgatgccgatgtatgttccgcgcaaggtttgcaaaagcgtagcgacgccgcatgttaacaggtcaatcgccaataggtaggacagctgttcagttgttacattcagcgccctgccgacaagcaggggcaccaaaatcgcacctgcatacatggcgagcacatgctgcaggctaagtgtaaacaccttaaacgatctttttttcactatagtccctccctgtatgtgaactttagtaacataatatcgttccggtcgaggggtgtcattggatacagtagctgaaaaagacaggtgtgattgctgaaagtgacgaaaaacgattcgttttgtaagaaaatgtaacaaactttagctgatcagccgctgcatacgtaatgcaagccgcaaacgcatcgttgtttcaggatcttttaagcttttccccagaagctcttcgcatttttcaaggcggtatatgaccgtattgcgatgaacgtacagacgctttgccgtctctgaaatttggcagtgtgtctctaaatagacggaaagcgtatgaagcaggctttgatcctcctgctgtttttcagcgaggctctgaagcgtggagttgtaaaatttcttcaaatcctcaactgggagcaagcgcagaagctcaggcacatctttggcgtgatacacctggataaatgcggtgcttcttgacaaatgccccgattgcagagcatcagaagcttctgtgaaagcgtcgggaacatcaatgagcttttggcagatattgctgatgccaaaggacacggttcgtttaaattgagcgctgacctgtgtttgaaactgttctaaaaagctgatcaccgaggcgtgcatttcactccagctgtctgtcgcctcgattagaataatgccgacatttcctttcataaagaagtgaggtggaaacgggaaggctgataattcaccttcaagaaattcgaatacgctgtcggaagcgagctgattttctgtaaagctgattgattcgtcattgcgatcgagtttgccggcgatgcacatgtatttttgatcccagcgcagcttgaattctttcgcccggtttttgatttcgtcatctgaagaaaaggtccgctcaataaaattgttgaaaaactcattgcgggcccgccggctgaactgcttcagcgcattttccttcagcagttcaaaggaaatgacgttggccgcttgttcaatcgtgaggatcaatcctttgtcgcctgcctgcaccatgtcgggtatcagcaggtagccgcagtttttttcgtgattataaataggcaggacagaatatgttttctgatctgagattgtagagaaacaagtgaaaaatggcccggatacggtattcagggtgcctttcagcttttcggtctcaactgaaatctgatgagacgcagacagcattttggcatgctggtcaagcagcagcacgggaagctgaaggatgtctgacacctttttgaggagggattgcagccccttgccgctcataatgtggtttgtgaattttttgtgcgcgtaaatggcttgctgcagctcgttagaacgcatatcgagaatatggctgagtgtggcattcacaatatcgccgagtcggatgtgttccggaagctcaatgatcggaaacgcatatgaatcggccagttcgatgatttccttcgggatatcttccagatagcgctttgttttaatgccgaggcccgcgcagccgcgttttgccatttgccgaatcagttcagataattgatgcgggtgatccttcaggtgataggcggtggtgacgagcaattcattcttatgcaaaaagtctacgatatccggagcgtccatcatattgacatgctgaacctctctttcccctcctgcttttccagcgattaaattggcgttttcaaaagccggtattttcatcacatcaaaaatattcatagcgcattctccttttctataaaaacattggttaaggtgaataattttcaataggaattctagcggttttgctgatgtaatacgatcatagtagcagtaaactgttgaaaatagaactggttgtgttacataaactgacatgaaaaatcgtcatccttacatggggggatcaatatggcttacgatatggtgataaaaggtgcgaaggcagttacgccagatggcgttatagaagctgagattgcagttcaaaacggtgtcattgctgagataggttctgacattgaagcaagcgggacggaaatcatccaggcagacgggaaatacgtgtttcctggtgtgatagactgccatgttcattttaatgaaccgggcagggaggattgggaggggtttgaaacaggttctcaaatgatggccgcaggcggctgcaccacctattttgatatgccgctcaactgtattccatcaaccgtgacggcagagcatcttctcgcaaaagctgagctaggcaggcaaaaatctgccgtggattttgcgctatggggcggccttgtgccaggccatattgaggacatccgtccgatggctgaagcgggagcgatcgggtttaaagcgtttttatcaaagtcaggtactgatgagttccgctctgttgatgaacggacattgctcaaaggcatggcagaaatcgcggctgcaggaaaaatcctcgctctccacgcggaaagcgacgcgatcacaagctacttgcaaatggttttggccaataaaggaaaggtggatgcggatgcgtacgccgcctcccgcccggaggaagcagaagttgaagcggtgtatcgcacgattcagtatgcgaaggtgacaggctgtccggttcattttgtccatatcagcacggcgaaagcggtccggctgatcagagaggcgaaacaggaaggtcttgatgtttcggtcgagacatgcccgcattatgtcttgttcagccatgacgatttacggcaaaggggctctgtcgcaaaatgcgcgcctccgctccggtcgctgcaatcaaaagagacgctgatcgaaacgctcattgccggggacattgacatggtttcctcagaccattccccctgccgtccatccttgaagcgggaggataacatgtttttatcatggggcggaatcagcggggggcagttcactttattaggaatgctggaactggcgcttgagcatcagattccgtttgaaaccatcgcagaatggacagcggcggcccctgcaaaacgattcggccttcagaaaaaagggcggcttgaggcggggtgtgatgcagatttcgtgctcgtcagcatggagccgtacactgttacaagagaatcgatgtttgcaaagcataaaaaaagcatttacgaaggacatacatttccctgcagcattacggccacttacagcaaaggccggtgcgtgtacaatgatggggaaaaagtcactgaaattgacggagctctggtcgttccttcgtaagcccggcggattttaccgccgggttttttgatttcctccgttctagtttttaaaatctcatcaacgtggtatctttttttaaaggaggcggaggcaatggagcatgtcaaatacatacttaagcaatcctggtcgcgccattcgagctctaaatggacggaagaatgcccgtcatgcggccaatgcggcgtgacggcattggtgattcaagaccatttcggcggcacgattttcaaaacaaaagtcgatgagagctggcatttttacaacagcatcaatggtgtggtgtacgattttacgagtgagcagtttcaggcgcctattgaatatcagcacattccttcctcaagagaagaggcgtttttagatacgaatgaggaacaatatcagcatttgcgtgaggcattttcccgccatatgaacagcatttccgaggaaacctgaaaacacgtgtgataaactggaagagaggtgaatgagtgtgatttatatcggactgacgggatggggggatcatgacagcatctatccgccgaaaacggccagccagaaaaaattgcaggcctattcctcccattttccgatcgtggaattagacgcgagcttttacgcgattcagccggcgcgcaataatgaaaagtgggtgaaggaaacgcccgaaaccttccaatttatcgtgaaagcatatcagggcatgacagggcatcagcgcggcgaaattccctttgactcaaaagaggagatgtttgatgcgtttaaggtgtctttaacgccatatttacatagcaataagatcgccatggtgctgtttcaatttccgccgtggtttgactgcaagaaggagaatgtcgcctatttgagatggtgcaagcaccaaatgggagatattccttgcgcgcttgaattcagaaaccgttcctggttctcgccgccattttatgagcagacgctttcatttatgaaagcggaaggctggattcacagtgtctgtgatgaaccgcaaatcggagaaggcagcgttccgactgtgttgcgcgcgaccgatgaaaacaaaacgctcgtcagatttcacggacgcaacaagcagggctggatgaagcctgatggcgggaaaaactggcgggaggtcaggtacttataccgctacaaccaacaggagctggaggattggaaaaagcacctgaatgaattgcagcagcaatgtaaggatgtttttgttctgttcaacaacaattccggcggtgacgccgcggataacggcaagcagatgcttgaactgcttgatatcgagtacagcggacttgctccgagacagctcgatttattttagaaaagaggtttttactgatgtcgtttgtgattttggtcgtcctgggattaatcgcaggtacggtaggaagtctgatcgggcttggcggcggaattgtcattgtgccgtctctgatgtttttaagcacagtgacggagctgtttcaggatgtgacgccgcaggttgcgattggaacttcgcttttggtcattatttttacgggtctttcttcaactttggcttatattaaatataaaaccgttgattataagagcgggctcattttctttatcggttcaggtcccggcagcatgatcggggcttacgtgtcaaagctgttcaattcaaactcgttttccgtttggtttggcatttttatgattctgatttcattatccttaatgctgaaagcgaaagcccggccaatcaacaaagcgcacaaaggcattattcggacatttcaggatgatgccggtgagccttatacgtactcatatcaggcccctgtcggtattgccattgcctttgttgtcggttttttaggcggacttttcggtataggcggcggatcactgatggttccggcgatgatgctgttatttctgtttccgccgaaggttgcggtggcaacgtccatgtttattattttcctgtcttctatgacagggtctgtttcacatatgatttccgggcacgtcaattggctgtacgccctcgcgcttgtgcccggcgcttggttcggcggaaagcttggcgccgccatcaacagaaaaatgcagacgaaaacgatcgttatgatcatgcggatcgtattgattttgatcggctgccagctcatttatgaaggcattttcagctgaacgattagggagagatattatgaaggagaagctccgcttatatcatacaaatgatttgcacagccattttgaaaactggccgaaaattgtagattatatcgagcagaaaagaaaagagcatcagtcagacggcgaagagacgctcgtttttgatattggcgatcatctagatcgttttcaattcgtgacagaggcgacattcggaaaagcgaatgtcgatctcttaaaccgccttcacattgatggagcggcgatcggcaataacgaagggattacgcttccgcatgaagagcttgctgccttatatgatcatgctgaatttcctgtcatcgtctctaacctgtttgataaaaatggaaaccgtccgtcctgggcggtgccttaccatatcaaatcattgaaaaacggtatgtccattgctttcttaggtgtaactgtgccgtattatcctgtttatgacaagctggggtggacagtaacggatgcccttgaaagtataaaggaaaccattctggaagtgaaagggcaggctgatattatcgttctgctgtcacatttaggcattcttgatgatcaggcagtggctgaagcggtgcctgagattgatgtaatcctcgaatcacatacccatcatttgcttgaagatggacaagtggttaatggggtactgctggccagcgccgagaaatatgggcattatgtcggctctgtagaaatcacggtggacagcgtacagcgaagcatcatcagcaaaacggcttctgtgcagaacatggcggaatggacaggagaatccgcagaaacaaaagcgtttctcaatgaaaaagaacgtgaagccgaggagaagctgtccgatgccgttgcagagcttgcacaagatgctgaggtgaagtggtttgaagaatcagagctgcctttgcttttagcatacgccttaaaggaatggtgcgagacggacatcagtatggtcaattcaggtgtcattctcggtccgcttaaagcaggtcctgtgacaaagctggatctgcaccgcatctgtccgcatccgatcaacccggtggctgtccgcctgacgggagaagaactgaaggaaaccattgtccatgccgcttccgaacaaatggagcagctccggatcaaaggactcggcttccgcggagaagtgatggggaaaatggtgtatgccggcgttgaggtagaaacgaaacggctcgatgacgggatcacccacgtcacccggatcacgctgaacggggaagatattgaaaaacataaacaatactccgttgcggtgcttgatatgtttacgctcggcaaactgtttccgctgattcgcgacgctgcagaaaaagaatattttatgccggaatttttgcgggatctgcttgcttggaagcttgcgcaataaggcagtcagcccacaacaagctgtgcccttcatcataaagtgatgaatgaagggagtggttgacgtggtaaacctgacaccgatcatgatagaaggacagccttttacagctgtgacagtaaagcttcccaaaacgaattttatggccgtcaccaatgatcacggatacattatgtgcggcgcgcttgatgtggcgctgctgaatgaaaaattaaaggagcgcggcatcgtggcggggcgggcagttggtgttcgcaccattgaccagctgttagacgcacctttagaatccgtcacgtacgccgcggaagatcttggcattcaagtcggcatgagcggcagagaagcgcttttaaaaatggtgaaataaaataaattggctccggctattactatgtcccctcttacaagcatacattgtgatatgtaaggggggattttcttgccaagatatcgcggcccttttcgcaagagaggacctttgcctttccgttacgtgatgctcctgtccgttgtcttttttatcctgtcaacaacggtcagcctttggatgatcaatggctcgattaaacctgttttaatggacatcggcgagatggaaacgaagcgtatagcgacagaggtgatccaggattcgattgaggactatatgtctgacagtgaaaatatgaaagatatgtttcaaatgaattctgatgaaaacggaaacttaacgacaatcgattttaatacacaggttgtaaacagtgtgaaaacaaaagtgacaaagcagcttcaggctcatttgaaagagatggaaacccataccggacacagcggcgccagtgaaaacattatgatcaacattccgctgggacaggtaaccggcaacagccttcttggaaacctcgggccgaaaatcccggtccggttcaatttaatcggtgacgcttttacagatgtcaaaaccaaaatcaagccgtatggcataaataacgcacttattgatatcagcatctttgtcgaaattaaagtgaaggtcatcattccatttgccagcaaaaccgctgtcgtcacaaataatgttcctttatcgattaaagcagtgcagggcgaagtgccgcagttttataatggaagcggcggctcgggtgtcacgccttctgtccagcttccgagcagcaaagaagacggtgccgattcaaaaaaagaaaaaagcagcaaataagccgcctgtcgaagaggcggctttttgttacttctttttttggtattcatatcgctcccacgccctcaaatgcgggtatggatcaaatgaccattcggttcttccgttatctttgtacatgccatagtgcagatgcggcgggaacttcccggcggttcccggcgggccgtatccggagctgccgactgatccgatcacttggccaggctcaacgatttgtcctgttttaatccctttggcaaacccattgagatgggcaaaataatgatacgtattgttaatgtctctgatgccgattctccatcctccgaagcggttccagcccttcatttcaactacgccgtaacatgtggatttgacaggaaggccgtaatgggcaaagatatccgtaccttcatgaatccgccttcctccgaagccgcgggcatctccccacgtgcttcgatagctgtaatcggttctgatcggaagcgggaatgcatgctcgcccagatcaatatggccgtaggttttaaacagcttcataaattcagatatgatccccactgtctgatcacgccggtaataattccaaagcccgatccggatgttgtcttcatctgtgccatacgacagtaagtattggctgaacgtatacaaaatatcttcatcgttgctgacctcggctttcccgtctccatcgccatccattccgattccgtcaaacactttaatgcttaacggcgcatcgtctttcggattcgggttttcaggcccgctccagatgtcatcgggtatatagatgctgatgattcccgccttgtcaggcagatctttccggttgctccgcacgttttcctcgtattgatcaacagcggcgagcgcataccaagggatctgcgtcacagcttcgattttatgatataattccatccgtttcgacagcactggatctgaaagtttttttccagacgcagaaggctcaaatgcaaacaaaaggagaagaagagcggataacaaaactttcacaaaataatctcctttcatattgaatacacatagtttgcggcaacccggcttaaaaatgtcagtaatcatcttcccttgtcgagaaatttttcctatgttaaagtgtctaaagaaaagactttctttagttagaaaaacattatttttgttgcagaactaaaacctgcacctttctcgttttcagaatgtttcgtgtcagaaattgagtatattggatattggagatgatgggaattggcaaagaaagacgaacacctcagaaagcccgaatggcttaaaattaaattaaatacaaatgaaaactatacagggctcaaaaaactcatgcgggaaaacaacctgcataccgtatgcgaagaagcaaagtgtccgaatattcatgaatgctgggcggtcagacgtacagcgacatttatgattttaggttctgtttgtacaagagcatgccgtttctgtgctgtcaaaacaggccttccaactgagcttgatctgcaagagccggaacgcgtagcggattcagtcgcgcttatgaatttgaagcacgcggtcattacggctgttgcgcgtgacgatcagaaagatggcggggcaggcattttcgcggaaactgtccgtgcgatccgcagaaaaagcccgttcacaacaattgaggtgctgccgtctgatatgggcggaaactacgataacctaaaaaccttgatggatacacgcccagacatcctgaatcacaatatcgaaacggttcgccgcctgacgccaagagtccgcgcgcgtgcgacgtacgaccgttcattggaatttttgcgccgtgcgaaggaaatgcagcctgacattccgacaaaatcaagtatcatgatcggactcggcgaaacaaaagaagagattattgaagtaatggacgacctcttggcgaacaacgtggatattatggcaatcggccaatatctgcagccgacgaagaaacacttgaaagtccaaaaatactaccatcctgatgaatttgcagaattaaaagaaatcgcgatgcaaaaaggcttcagccattgtgaagccggtccgcttgtccgttcctcttaccatgcggatgaacaagtaaacgaagcatctaaaaagcgtcaagcacaagcataatgccaaaacgccagatcatctggcgtttttgtcattcctatcgattttcatgtcctgacgcgtttctccattggcattttcattctctgagacagggcttccttgcggggaggttttcatttcttgaatcgtccccgacatgatctctctaatatcccttgaaccagagccgagattgctgtaattttcgacggattgcatatggtttggattatcggaaatatacacgtgatagtatcgcggtatcacagaagccgctgtttttttcacctgatcggcggtcagctcccggtttttagaatcggttttgtatacgacaagcgcttctcggtcagtcaccaatgtcgcagcatcttgaatatgggggagctgaaccgttaaacttgatatcatgtgagcggtttcttcccggttcatcaccggcgttttctgctgttctccgtcaaattgttctttttgatagcggacatagccaaattgttcgttctcattatgcctgttaaaagcctcgttgcggtccgacacatgaatgggtttggtttgattctgcgtctgattccggacattttgggcattatccaatcctgcgcctccgcacccggataatagtccggtcagcaggcagaggctgacagcggttcgtttcatttatcaatccctcctcatgtgtagggtagccaaatcgcatgatttattctttagcaattgatggggacggggcaatgaattatgataggaatgagtgaaaaaagaggtgagatcatgattcttattcaaaatgccgaatttgaattggtgcacaatttcaaagacggcttcaacgaagaggcttttaaagcccgctactccgatatattaaataaatacgattatattgtgggagactggggatacggtcagttaaggctcaagggcttctttgacgaccagaatcaaaaagcaaccttcgaaacgaaaatcagcacattagatgaatatatttacgaatactgcaatttcggctgtgcgtattttgtcttgaaacggatcagaaaataaatatacacaaaggggatgctgtcatgtattttgttgacagaagcaaaatcgagaaaacactagggttcttcgagcaccagctggcgctatttgactcacaaacagactggcaatctgaaatcggggaattggcacttcagcgtataggccatctgttaatcgaatgcattttggatacaggcaatgatatgattgacggctttattatgcgggacccgggcagctatgacgacattatggatatacttgttgatgagaaagttgtcacggaaaaagagggtgctgagctcaagaaattgatcgcctaccgtaaaacgttggttcaacagtatctgctcgctgacagcggcgagctttacaggctgatcaaggcgcatcaaacagctcttcaggacttcccgaaacggatcagaagctatttggaaacagagctaggacctgtttctgcgtttaaataacaactggaaagccacaggagtgttggatatgaaaacatataaagggtatttaattgatttagacggaacgatgtacaatggcacggaaaaaatcgaggaagcgtgtgaatttgtcagaacgctgaaagatcgcggcgttccttatcttttcgtgacaaacaactcttcgcgcacaccgaagcaggtagcggacaagctcgtgtcttttgatattccggcaacagaagagcaggtcttcacgaccagcatggcaactgcccagcacattgcacagcagaaaaaagacgcgtctgtgtatgtgattggggaggaaggaatccgccaggcgattgaagaaaacggcctgacatttggcggagaaaacgcggattttgtcgttgttggcatcgaccgttccattacatacgaaaaatttgctgtcggctgcctggcaatcagaaatggcgcccgctttatttccactaacggagatattgcgattccgactgaaagagggctcctgccgggaaacggctcactgacatcggtgttaaccgtatctacaggtgtacagcctgtatttatcggcaagccggaatcaattattatggagcaggcgatgcgcgttctcggcacagatgtgtctgaaacactcatggtcggcgacaactacgccactgatattatggccggcattaacgcgggtatggatacgctgctcgttcacacaggcgtaacgaaaagagaacatatgacagacgatatggaaaaaccgactcacgccattgactctctgactgaatggattccatacatttgaaaaaagggcgccctaaaagggtgcccttattctgtatgccgcgcgcggtgagcaagtctgcttgaagccgcggcggaaatcgctccgacgatgtcatctaaaaaggtatggcattcaccggttgatttatcattcaatcgtttaaggattccgggtttttctttgtcgatgtaaccgtagttcgtaaacccgatcgatccgtaaatgttcacaatggaaaatgccagaacttcatctactccatataggctttcatctatttccagcatcgtttgcagcggttcagacagttttttctgctcagcaagaacatccaattcaatgcccgttaaaatcgcgttttgcacctcgcgttttgcgagaacacgattgacgttcagcgtgcattcatcaatggttaaatccggatgatattttttctgcagaaaaaagacaagctcggcaatgtctgatacctcaacgccgcgctccttcatccgtgctcttgctttagcttccatctgactgaattgttcgttttctgacatcagcttcacccaatcttttttactagtttatacaaaatgcttgagaagtttacgactttttcttgcgccttcttcggattaaaatatgtattcataattccggctgtgtatgactacgatgtgatgagccctaattcaacaggcaggtgatcatggtgaaaggtacaataaaagaaaaatacggcattcacatcaggcagctttccatgtaccagcacacatatcaatgctttcagacgcctaattcatactttctgattgtccccgtttcccaattctcagaaacagagctggcggagctttattacatgagtcagtatttacaagaacaaagtgacccatacgtttcggtttttatctttacaaaagaaggtgaactgacatttgaacatgagggaaaaacgtacgctctgctgaaggcggcccccccttattcaaacagggcgttctccattggagcggagcttgcggaatttcaccgaaaaggccgaggatatccatatgaggtgaaggcggccggaagaatcggccagtggaaggatctgtggggaaaacgaattgatcagctggaagcattttggcagagaaaggttcagacccctccgcatgagccattcgataaaaaaatgatcgaatcatttccatattatttaggactgtcagaaaacgcgatacaatatttagtggacactgagctggatgacaagccccaagccgctgattcaggaacgatatgccatcagcggatggaaaggcatacatggtcaccggaatcattgatcaggattccggcggattgggtgtttgaccacgcttcccgtgatttggctgaatatatgaggcatacgtttttgcatcacagacaagattttaatcagcagggctttctctttttacaggaatacgagcaagtcacaccgctgtcttcattttcgaaacgccttttatacagccgtctgcttttcccgcttcattattttgaaatcgtagaaagctattacatgtcatcagaatcagaaaagcattattttgaagaacagcttaacttcattcttaatgactgtgggcgttatgaacaatttctcaatacagcgcaggaattcatgaatatgcgggcgcagaagctgtttgttccacgcgtcagctggctcggcaaaggcagctcagggtgaggagaaaatctgacaaaaataattagaaaataaagaatcttgtcatatcaatgcgttaagcgtttacattcgcaaaattcagcctaatgctgtcttgtcaaaacaggagcgggcttatataatgtttgtaacttatatgtctgtgttgagttaacaattgtctttttcaagaggacaatcaaaagaaaggtggagtttttttgaaagcgattcgtgtagggcttttaggtttaggtaccgtcggaagcggtgtcgttaaaattattcaagaccatcaggataagcttatgcatcaggtcggctgtccggttacgataaaaaaagtgcttgtaaaagatatagagaaaaagagagaagtagatttgccgaaggaagtgctcacgacagaagtgtatgatgtcattgatgatccagatgttgatgtcgtcatcgaggtgatcggcggagttgagcagacaaaacaatatttggtcgacgcgctgagatcgaaaaagcatgttgtcacagcaaacaaggacttaatggctgtgtacggctccgagctgcttgccgaagcgaaggaaaatggatgcgatatttactttgaagccagtgttgccggcgggattccgattctgcgcacgttagaggaaggcctctcatctgatcgaattacaaaaatgatgggaattgtgaacggcacaacaaactttatcttaacaaaaatgatcaaagagaaaagcccatacgaggaagtgctcaaggaagcgcaggatctcggttttgccgaagctgatccgacttctgacgtggaagggcttgacgccgcacggaaaatggcgatattggcgcgcctcggcttctcgatgaacgtggatttggaagacgtcaaagtaaaggggatctcccaaattactgacgaggacatcagcttcagcaaacgcctcggctatacaatgaagctgatcgggattgctcagcgtgacggcagcaaaatcgaggtcagcgtacagccaacactgcttcctgaccaccatccgctttctgctgttcataatgagtttaacgctgtttatgtatacggcgaggctgttggtgagacgatgttctacgggccgggagccggaagcatgccgacagcgacatccgttgtttctgacctcgtcgctgtcatgaaaaatatgcgcctcggcgtaaccggcaacagctttgtcggaccgcaatatgagaaaaacatgaaatcgccgtctgacatttatgcacagcagtttttaagaattcatgtaaaagatgaggttggttcattctcgaaaattacatctgtgttctcagagcggggcgtgagctttgaaaaaatccttcagctgccaattaaaggccatgatgagttagcagaaatcgtaattgtcacacatcatacatcagaagctgatttcagtgatattctgcaaaacctaaatgatttggaagtcgttcaagaagtcaaaagcacatatcgtgtagaagggaacggttggagctaatgtggaaaggacttatccagcaatataaagaatttttacctgtaacagatcaaacaccggcgctaactttacatgaaggaaacacacctcttattcacctgccgaagctgtctgagcagctcggaattgagcttcatgtcaaaacggaaggcgtcaatcctacgggatcatttaaagatcgcggaatggttatggctgttgcaaaggcaaaagaagaaggcaatgacacgattatgtgcgcgtcaacaggtaacacttccgctgctgcggcagcatatgcagcccgtgctaacatgaaatgcattgtcatcatcccgaacggaaaaattgcgtttggaaaactcgctcaagctgtgatgtacggagctgagattatcgcaattgacggaaactttgacgatgcgcttaaaattgtccgttccatctgtgagaaatcaccgattgcccttgtcaactcagtcaacccttaccgcattgaaggccaaaaaactgctgccttcgaagtgtgcgaacagctgggggaagcgcctgatgttttagcgatcccggtcggaaatgctggaaacatcactgcgtactggaagggcttcaaggaatatcatgagaaaaacggcacaggccttccgaaaatgcgcggctttgaagctgagggtgcggcggcaatcgtgcgcaatgaagtgattgaaaatccggaaacaatagcgacagccattcgtatcggaaacccggcaagctgggacaaagctgtaaaggcagccgaggaatccaatgggaaaattgacgaagtcactgatgatgaaatccttcacgcatatcagctgatcgcccgtgtagaaggcgtgtttgcagaaccaggttcttgcgcgtctatcgcaggagtgctgaaacaggtgaaatccggagaaattccgaaaggcagcaaggtcgtagctgtgttaacaggaaacggactgaaagatccgaacacagcggtcgacatttcagaaatcaagcctgtcacattgccgactgatgaagacagcatccttgaatatgtaaaaggagcggcccgtgtatgaacgaagccgacatgctgttctctgtcactgttcccggaagcacagctaacctaggccccggctttgattcagtcggaatggcgctcagcagatatttgaagctgaccgtctttgaaagcgacaaatggtcttttgaggctgaaacagaaacagtcgccggaattccggcgggtacagataacctgatctaccaagtggctaaacggaccgcagatttgtacggaaaagaaatgcctcctgtccatgtgaaggtgtggagcgacatcccgcttgcacgcggccttggcagcagcgccgcagcgattgtagcggccattgaactggctgatgaattatgcggcttaaagctgtctgaagcggacaagctgcatttagcgagtctagaagaaggacacccggacaatgctggcgcttctctcgtcggcggacttgtgatcggcctgcatgaggatgacgagacccaaatgatccgcgtcccgaatgctgacattgacgtagtcgttgtcattcctttttatgaagtgctgacaagagacgcgagagacgtgcttccgaaggagtttccatatgccgatgccgtaaaagcaagtgctgtcagcaatatcctcattgctgcgatcatgtccaaggattggccgcttgtcgggaaaatcatgaagaaggatatgttccatcagccgtaccgggcgatgcttgtgcctgagctgtcaaaagtagagcacgtcgccgagatgaagggcgcatatggaacggctctcagcggagcaggcccaacgattctcgtcatgaccgaaaaaggaaagggagaagagctaaaagaacagctcgcgcttcatttccctcattgtgaagtagacgctttgaccgttccgaaagagggaagtataatagagcgaaatcctttatatcaagtaaaaagtgtatagatcatgccaagcgttcctcagcgtcagcggagggcgcttttttttgctggagataaaggagtttttatttagaaaaacgaaatacatgtaaaaaggaggagatgaatatgaaaaagctgataaccgcagacgacatcacagcgattgtctctgtgaccgatcctcaatacgccccagacggtacccgtgccgcatatgtaaaatcacaagtaaatcaagagaaagattcgtatacatcaaatatatggatctatgaaacgaaaacgggaggatctgttccttggacacatggagaaaagcgaagcaccgacccaagatggtctccggacgggcgcacgcttgcctttatttctgatcgagaaggcgatgcggcacagctttatatcatgagcactgaaggcggagaagcaagaaaactgactgatatcccatatggcgtgtcaaagccgctatggtccccggacggtgaatcgattctggtcactgtcagtttgggagagggggaaagcattgatgaccgagaaaaaacagagcaggacagctatgaacctgttgaagtgcaaggcctctcctacaaacgggacggcaaagggctgacgagaggtgcgtatgcccagcttgtgcttgtcagcgtaaagtcgggtgagatgaaagagctgacaagtcacaaagctgatcatggtgatcctgctttttctcctgacggcaaatggcttgttttctcagctaatttaactgaaacagatgatgccagcaagccgcatgatgtttacataatgtcactggagtctggagatcttaagcaggttacacctcatcgcggctcattcggatcaagctcattttcaccagacggaaggtatcttgctttgcttggaaatgaaaaggaatataagaatgctacgctctcaaaggcgtggctctatgatatcgaacaaggccgcctcacatgtcttactgagatgctggacgttcatttagcggatgcgctgattggagattcattgatcggtggtgctgaacagcgcccgatttggacaaaggacagccaagggttttatgtcatcggcacagatcaaggcagtacgggcatctattatatttcgattgaaggccttgtgtatccgattcgtctggaaaaagagtacatcaatagcttttctctttcacctgatgaacagcactttattgccagtgtgacaaagccggacagaccgagtgagctttacagtatcccgcttggacaggaagagaaacagctgactggcgcgaatgacaagtttgtcagggagcatacgatatcaatacctgaagagattcaatatgctacagaagacggcgtgatggtgaacggctggctgatgaggcctgcacaaatggaaggtgagacaacatatccacttattcttaacatacacggcggtccgcatatgatgtacggacatacatattttcatgagtttcaggtgctggcggcgaaaggatacgcggtcgtttatatcaatccgagaggaagccacggctacgggcaggaatttgtgaatgcggtcagaggagattatgggggaaaggattatgacgatgtgatgcaggctgtggatgaggctatcaaacgagatccgcatattgatcctaagcggctcggtgtcacgggcggaagctacggaggttttatgaccaactggatcgtcgggcagacgaaccgctttaaagctgccgttacccagcgctcgatatcaaattggatcagctttcacggcgtcagtgatatcggctatttctttacagactggcagcttgagcatgacatgtttgaggacacagaaaagctctgggaccggtctcctttaaaatacgcagcaaacgtggagacaccgcttttgatactgcatggcgagcgggatgaccgatgcccgatcgagcaggcggagcagctgtttatcgctctgaaaaaaatgggcaaggaaaccaagcttgtccgttttccgaatgcatcgcacaatttatcacgcaccggacacccaagacagcggatcaagcgcctgaattatatcagctcatggtttgatcaacatctctaataaaaaagccaggctgatcaaatatcagcctggctgctttattaaaagacttgttctacttcaacgacacccggcacttcttcaagaagagcgcgctcaattccggctttcaacgtaattgttgaacttgggcagctgccgcatgcgcctagaagacgaagcttaacgataccttcatctacgtctacaagctcacagtcaccgccgtcacgaagtaaaaacggacgaagtttgtccagtacttcctgcacctgttctttcatttcaacttcagtcatgacattcgctcctttcgtcgtcataaaaccattatattcagtgtaacaataaaaatctattgtttggtttgcaaagttgctttccctattatagcacattcagacttcaacacaaaaacggtttttttctataaaaacgcccttaggctctgtatacttaaaagaaaggacttacataggagaagggggcgtctacaagtgatgaaaccagtcatgctaagcgtgtacggggcagaaaacgtttgtgcgagctgtgtaaatatgccgacagccaaggatacatacgagtggcttgaggctgcgctgaaaagaaaatatccaaatcagccttttgagatgcagtacatcgatattcatgagccgcctgacaatgaacatgcgaaagagcttgcggaaaaaatcagaaatgacgagtatttttatccgcttgtgcttgtagaagacaaaattgtcggtgaaggcaatccaaaattaaaagacgtttatgaggaaatggagaagcatgggtatacagaaaaccgctgacttgatcagcggttcttctctatcattaaccgttatggtgtttatacatccacagcaagccggatttcagcatacgcggaacacggccgatcagcggacggtcagcaacaagcccgaagccggctttttttccgagtgaaccgaggacgcctttcagcttaaactgcggcattgattcaggcagggcttctccattccagcgtttttgcaagatttggacaatctgctctgcttgagcctctgccagctgggcgctcggtgcatgaggaagactggcgcaatcgccgacaacgtacagatgttcatcacctggaagattatgatgaggcgttaatacaatacgcccttgtgcgtccttctccacatctaagtctctgacgactttgtttggctggatgccggctgtccacacgatggcgtctgcagaaatcggatcatcgtggttatacacaacgccttcttctacttttgtgatatttgccctgttaataatgcggacaccgtgctcttcgaaccatttttgcacatatttgcttaaacgctcgggaaagcttgataaaatgagattaccgcggtcgaacaaaataatgttcaggtcatcacggctttctctcaattcacttgcaagctcaacgccgcttaagcccgctccgacaatggcgacggtggcattagcgctcagattattcagcttttggtaggtttcgcgggactgatcgatggtttgaatactgtaggtgaattcaggcgctcccggcacgttgtgatatttatcctcacagccgagcccgattatggcgtcatcgtaagaaatcggttcacgatcttggaacagcacttgtttttgtacaatatcaattgatgtgatatcaccgtattggacatccaggcgagggtgctctgggaatgacactctgatatgatggtcagaaattgtgcctgcggcaagggcataatattctgttttcaagcagtgataaggatttctgtcaattaacgtgattgaaacatcatcaggcagctggtttggcaataagcgatgaagaacgcgcatgttcccgtaacctccgccgatcaagaccaattttttcatttgaattcccctttaatccgaagagtatgatagatacattgaagaaaatacgaactatgtaaaataacatctagaattatatcgaatttgatctaaaatcacaataatagtttcaaaataacctacaatttagcctgaaaacacaaattagtaaaacgttatttgagaaataatatgttacgataataaattttgaatcatccgttgtctttgacgaatagtgaaaaattcgcgataatggacatatgtgaggtgaaaccgcatgaatccaatgattgaattttgtgtcagcaatctggctcacggctctcaggaagcccgggcgattttggagaaggatcccaaccttgatgtccttgaatatggctgcttaagctactgcgggacatgcatggaatcgcttttcgctctggtaaacggagaagtcgtcatgggtgaaacgcctgctgagcttgttgagaatatatatacctttattgaagaaaatccaatgttttaaagaaaagggcctggacaggcccttttttattttgccgtacaaaagaactaaaaaaatgtgtagacatcaaaaaatattattgttatcgtataaaagatatttttttaaataaaatttaagaggtgtacgagtattcatgaatgttctgtgggggctgctgggcgcagttgcgatcattgctatcgcgtttttattttcagaaaagaaaagcaatattaagataagaaccgtcatcgttggtttatgcacacaggtggcgtttggatacatcgtgttgaaatgggaagcgggacgcgctgtttttttatggttttcaagccgtgtacagcttctgattgactatgcgaatgaaggcatcagttttatttttggaccgcttctaaaggtcggagacagtccggcatttgcattaagtgtactgcccgttatcattttcttctcagcactgattgcagttttatatcatttgaaaatcatgcagctcgttttccgtgtcattggcggcggattgtcgaagctccttggaacaagcaaaacggaatctctggcggctgctgccaatatttttgtaggacaatcagaatctccgttagtgatcaaacccctgattgccgggctgacgcgctctgagttgtttacgattatgacgagcggtctatcggcagttgcgggatctaccttgtttgggtacgcgcttctcggtattccgattgagtacttgctggcggccagctttatggctgctccagctggactagtctttggtaaattgattatacccgaaacggaaaaaacgcaaaccgtaaaaagcgatttcaaaatggatgaaggcgaaggcgcagccaatgtcattgacgcagctgcaaagggagcgtcaacaggactgcaaattgcgttaaatgttggggcgatgctgcttgcgtttgttgcgttaatcgctgtagtaaacggtattctcggcggggctttcggcttgttcggtttaaaaggcgtaacattagaatccattctcggctatgtgttttctcctatcgcctttttgattggcgtgccttggcatgaagcattgcaggcgggaagctatatcggccagaaattggtgctgaatgagtttgtcgcttattctaacttcggtccgcacatcggcgagttttctaagaaaactgctaccattatcagtttcgcgttatgcggattcgccaatttttcatcaattgcgattatgcttggtacgcttggcggtttagcgcccagccgccgttcagatatcgcacgtctcggcctgaaggctgttcttgcaggaacattagccaatctgctcagcgcagccattgccggcatgtttatataaacgataaaagctccttgcgtcagtgcaaggagcttttatgtatgaaaaacgggggataattgtattgtgtccgcttataatagcttttatactaagaaaaagaaaaaaagttggaggcacctatgaactcatttcgatttaccaaaatgcacggcctgggaaacagttatatttatgtgaatcaatttgaagaacagcttccagaagaaaaactgtcagagattgcaattcaggtttcttctgtttatacagggatcggatccgacggaatgatcctgatatgcccatcagaccaagcgcctgttaaaatgcggatttttaataatgacgggtctgaagggaaaaactgcggcaacggcctgcgctgcgtcgcaaaatacgcatatgagcataagctggttgaggaaacatcttttctgattgaaactctctccgggcttgtgaaagcggaggttcaagtcgaaaacggaaaagtgaatgtggtcactgtcgatatgggcgaaccgcgcttgacaaaatccgagctcccgatgcttgacggcggggaagagcacacaatcaatgaaacgatggcatttggtgaagtagaactaacaggcactgccgtttcaatgggaaatccgcatatcgtttttccgatcgcagacattgaacaggcacccttaacgacactggggccggtgattgagaaagatccgagatttccggaaggcatcaatgtggaattcgttgaaaccgtgaatgaacaagaattgcatttccgcgtctgggaacggggatcagggattactcaggcatgcgggacaggagcatgtgcagcggcagttgcatctgtattaaacggcgtatcaaagcgaaatcaagacatcacggtgcatttagcaggcggggatttggtgataaactggaaagataacggccatgtaatgatgacagggccggctgaaaccgtttgtgagggtgtctatttcttgtaaaacaccttgtttgagaattggaacgatcatgtttataataaaagacagcaaccggtttttaaaaggaggttcacaatgatgagcaacccggtaacaattacagaagcagcagctttgcatataaaagatatgatgaaagagcatgaagaagaaaacgcgtttctgcgtgtaggcgtcaaaggcggcggctgcagcggactttcttacggcatgggctttgagcatgaaaagagtgaatcagacagtgtgtttgatcagcacggcatcactgttctagttgacaaagaaagccttgacatcatgaacggcaccgtgattgattataaacaatccatgctcggcggcggcttcaccatcgacaatccaaacgccattgcttcatgcggctgcggttcttcgttcagaacagcaacgaatgcaggcaagcctgaagagtgctaggcactaaaaacggatagcaactattactgacgcttttcttagcgataaatcatcgttaagggaggcgtttttattatggggaatgatgcagagagttccggggacttcggcaagagaaacgctgctttgttgtttgatttttgttgtaaatacagcaaagttacgctatatttaatgcggagtatattttattgcatttacaacaaaatcacgatagggagttgatgatgaagaagatttttggaatggtaacaaggccagtatctgttccgtgtttaaatatattaaaaagggacactagacaattgaatttaaaataaaggggctgaatccgaacaatgagtgtaaaaatgaaaaaatgcagccgggtagatttacaaacacttcaacaattgagtattgaaacattcaatgacacttttaaggaacagaactcacctgaaaatatgaaagcctatttagaaagcgcatttaacactgagcagctggaaaaagagttatccaatatgtcttcgcaattcttttttatttactttgatcatgaaatcgctggatatgtaaaggtcaatatcgatgatgctcagtctgaagaaatgggtgctgaatcacttgaaatcgagagaatttatataaagaacagctttcaaaaacatgggcttggcaaacatctgctgaataaagcgatagaaattgcgctggaacgtaataaaaagaacatttggctaggcgtgtgggaaaaaaatgaaaatgccattgccttttataagaaaatggggtttgttcagaccggcgcccactctttttatatgggtgatgaagagcaaacggatttaatcatggctaaaacactcatataatatttttcgaagggtggatgatgatgtatattccaaaatattttaaagtcacaaatgctgaagaaatttggaattttgtacaagaaaactcctttggtacgattgtcacaacagaacaaggaaaaccaattgccacacatttgccgttaggattcaataaaaaagacgatcattactatattacggggcatttcgcttatggaaatcctcagtggagaacgtttgaagcctgtgaagatgtacttgtgatgtttcagggaccgcacgcttatatttcttcttcctggtattcgcgcgaaaatgttccgacgtggaattatcaggctgtccacatgtatggaaaagcaagtatgttagagacagatgaattagcagaagaattaacaatcatgctggagaaatacgaaaaacatcgtgacaatcctgttttatgggataagctttctccaaaactcttagaacgtgaattgaaaggtatcgttggatttaagattaaggtggaagatattcaagcggcatataaattaagccagaaccgaaatgaaacggattatatgaacattattgaacagttgcaaaatgaagaaaatccaaatgcaaaacaaatggcagaactgatggaaaataaattcaaaaagcaaatataagcttactttgctgaagaagtagcagaaaacgccaactcaagcggagaaccgctgacttggcgttttttatgattaatatttatccccattaaaaatagaattcttcacaatcacataatccacattgcggatggcgtcaagctttgttccgcctgcataagaaatagaagattgaagatcctgctccatttcaatcagtgtatccttgattgagcctttatgcgccacgtgcatttttttgccttcgacatttttcttttcgcctttttggaattcagaggctgagccgaagtactctttgtaaagctttccgtctttttcgattgtttggcctggcgattcttcgtgtccggcaaatagtgaaccgatcatgaccatcgttgcgccgaatcggattgattttgcgatgtcgccatgggtgcgaatgccgccatccgcgataatcggtttgctggcagccttggcacaccagcgcagcgccgctaattgccagccgcctgtaccaaagccggttttgattttcgtaatacatacttttcccggtccgatgccgactttagtggcatccgctcccgcattttcaagctctctgactgcttctggcgttccgacattgccagcaataacaaagctgtccggcaaatgttttttaaggtgctgaatcatttcaatgacagcatttgagtgcccgtgagcaatgtcaattgtcacgtattcaggagtcagattttcttctgccagctggcggacaaattcatactcctcatctttgacgcccacgctgatagaagagaataacccgcgtgcgttcatatctttaataaaatcaatccgtttttcaggttcaaatcggtgcatcacataaaagtagccattttcggctaatgaaatcgctagtttttcatctataatcgtctgcatattggcagggacgacgggtaatttaaatgtacgtccgcctaaacgtacggatgtatcacattctgaacggctatttacaatgcattttgcaggaattagctgaatatcttcgtaatcaaatacgttttccatggttttcactcctaaaaacgaatatttaaaattatattatatgaaatgttcgccttctataatgtactctgttttatttaggatgtcaaacattatgattttctggcaggtgtggtcaagtgccgaagcttgtcatgcagggtgagtttaggtatcatagttttaacgaatggtcttagagagcggatcaaaacgcgaatgatatacgttcagcaaagcttggtcgttcagcaccaagctttcttttggcatggacatgggaaaggagcgaataaaatggcccaaaacgaagaaaaaacaccgaagtcccaaaagattcaggaccgcattattatggcaatgatctgggtagtcgcagcccttgtgattgcgctggttgtaggaactgcattgaattatataaatatcttcaaataaaaaaggagctgtgtcacagacacaagctcccttttttattatttattttcaaaaagacttgttgagtgaagaggctgtacgcgggctttcgggtccatgtaagccttggcgttgttcactgctgtcggtgcctcaccgaagccgctggcaatcaggttgacttttccttcgtatgtacaaatgtcacctgctgcaaagaagccttcgatatttgtttccattgttgattttacgacaatggaatttttctcgatgtccagaccccagtttttgatcggtccaagagatgaaacgaaaccgtagttgacgattaagtcatcaatttctaaaatctctttgcggtcgcctttcacttcttcaagcactagctgttcgattttgtcttcgccgatcagctccgcagggacgaatggtgtcaggacattaaccttcgacgcatgaaggttttccacactgtgctcgtgcgcacggaacttgtcacggcggtgaatgatcgatacttcttttgcgatcggctcaagcataagcgcccagtcaaccgcggaatctccaccgccaaggatcgcaacgcgtctgccggcgaatttttgcagatcatcaacgaagtaatggaggtttttgccttcatactgctcggcattttcaagttccagctttctcggtttgaatgcgccgtttcctgcagtgatgatgaccgttttagagtagtgggtttcttcatttgttacaagcttaaacacgccgtccgcttgtttctcaacagattcaaccgcttgctccagacaaatggtttggtcgaattttgccatttgctcttttaggttattgataagctcttgcgcacggattttcgggaatcccgctacatcatatatatacttctcagggtatagggcgctaagctgtccgccgagctgaggcaggctttcgataattttgacgcttgcctgtctcatcccgccgtaaaaagcggtgaataagccgaccggtcccccgcctataattgtaatatcataaacctttgtatcctctcgcatacgaaaattgcctcctaaatgaaaattgttattaattataccatattgccgttcaaattgacgagtcagcagaaaaaatcgtaaggatctaacgtgcccatccgttcttgaaaatatttccgcaggccgctacgataataaccaaatgaaatgatctttttctgaatgtttcttgggccagccggataaacatgataatagtgctacgggtaaggacttcacaaaaaacttttcaatatatttcataaaatcccgccaataagctgaagctaacacaaatgatgattttattatgggtctaacaaaagcaaaaaaagagaaggtggatgtgatggcattgaataagcccaaaatcgtgattttaggtgcaggatatggcggattgatgacggtgacaaggctgacgaagtatgtcgggccgaatgatgctgacattacgcttgtaaataaacacaattatcattatgaaacgacatggatgcatgaagcgagcgcgggtacgctccatcatgaccgctgccgttatcagataaaagatgtaatcaaccagtcacgggtgaattttgtacaggataccgtaaaggcaatcaaaattgatgataaaaaagttgtgcttgcgaatggggaactgcagtacgattatttagtcatcgggctcggcgccgtgcctgaaacgttcggcattaaaggcttaaaagaatatgcgtttccgattgccaacatcaacacgtcgcgcctgctgcgggaacatattgagctgcagtttgcgacttacaatacggaagcggaaaaacggccggacaggttaacgatcgttgttggcggtgccggatttacgggaattgaatttcttggcgaactggctgctcgcgtgccggagctctgtaaggaatatgacgttgacagaagccttgtccgcatcatttgtgtggaagcagcgccgaccgttttgccgggctttgatccggaacttgttgattacgccgtacattatcttgaggaaaacggagttgagttcaagatcggcacggctgtacaagaatgtaccccggaaggagtcagagtcggcaaaaaagatgaggaaccagagcagatcaaatcgcaaaccgttgtttgggcggcaggtgtccgcggccatccgattgtagaggaagccggttttgaaaatatgcgcggccgggtgaaagtcaaccctgatcttcgcgccccaggacatgacaatgtctttattctcggcgacagctcgctgtttatgaatgaagatacagagcgtccgtatccgccgactgcgcaaattgcaatgcagcagggcataacggtcgctaaaaaccttggcaggcttattaagggcggagagcttgaggaattcaagccggacattaagggaacagtggcttctcttggcgagcataacgcggttggggttgtttatggcagaaagctgaaaggcacgcccgcttcgtttatgaaaaaagtcattgataaccgctcgctgtttatgattggcggactcggactgacactgaaaaaaggcaagttcaagtttttctaaaaacccgcggaagcgggttttctttattaaaaaacgccaaaataaaaagagaacgagaggaaaacaagtatgtttccgcttacatcaaaagatttgtcacatgatctgactttattgttgacagcttgatatggtatattatcagaaaattaagaaaaagggtgatgattagatgaaaactgcaacgacaaccgcttcacatgcatgcccattttgttcaggaaaaggatattttcaattgattctcggcggttcagagacttgtccgtcttgccaggggacaggaaaagacagtcattctttttccagccgttgactttatttccacccccgcgttacactaaaaacaacgcaggggggtggaataggttgattagtctgccagtcgtaatcatctcaattgttttgttttttgtcttgttttttggaatcggtttcttattaaacatgctgctgagaatgtcttggattatggctgtgatttatccgattgtatgccttttcattatcagcaaagaaaagctgatcagctatgtccggtcgccgggagaatcctttgccagcctgtttcatcgtgtcttatcattagcggctgccgatgtgctgattttagccagcggtttggccggcgccatcgtgtccggtatagcgatcaacatgctcagaaaaagaggatatcaaatgttttaaatgccgctttcttctaaagaaagctttttttatgcgttcagctcattcatcattttgaataatgctctctccacttgggaacaatgattcggaggagaggtgaatgatgttgattatgatcagacgtttgctgatgacctgtttatttctgcttgcatttggcacgacatttttatcagtgtcaggaattgaagcgaaggacttgtcaaaatgggtgcaggaacatcagaaaaagcacttgaagcatgcaggactgacattaaaagcattgcagcagaaacaaacacaaaccacgtccgcggctgaggataaaacaaaaccgttagaagaggcatttgattgggatgaatatccagtccaaagagtaacagcaacaggctacacagcaggagctgagtcgacgggcaaaaatcccggtgatccattatacgggcttacatattccggtgtgaaagtgaaacgggatttatattccacggttgctgctgacccgtccgttttcccgatcggaacaattttattcattccgaactacggtctcggagttgtggccgacacaggatcggctattaagggaaaccgccttgatctgtactttgagacagtcaaagatgtatacaatgaatggggtaaaaaaacccttgatgtatatgtgattaaaaagggaacgggaaagattaccgaggatgagcttgagaagctcaatgaaacaaaatctttgcaagtgttcagaaatcaatataaaactgtgaaagaataaaacgctccagcgaaagcaggagcgtttttttacatgaaaaagtaagcgagtaccaatgtcagtaaaatacctgttagtcctccgaaaaagacttcgatcggctgatgtccgagaagctctttcagctttttttgcttttctttctctgcagccttagggaagtccttcgcttcatttacgaaacggttaaaatcaatgacaagcttattaatgactgttgcctgctcaccggcgtgacgtctgacgccagttgcgtcaaacatggttatgacggcgaaaatggcggaaaccgcaaagagtgaggagtctaatccatgctccaaggctacgcctgtagaaagcgcagtgaccgctgcggagtgagagctcggcatgccgcctgtgcttgtgaccagcgaccagtccagttttctggacacgataaactgtatgggcactttgatgacctgagcaaaaataattgcggccaggcttgataataaaggaaaattcgttaaaagttccatcggcgacatcctttctatttgaaaaatccttcgtgtttcaaaagaaaaaagcaagtcttagactgttgtttgttaaaataagtatagtggaaagaatgtttttcctattataccattgttcattacaaatacccattacgttaggagtgtaagcctcatgttttatgcggttcaacaatcagagcatacagaaacccttgtggtcgggctttttcaaaaaagccagctgacaggaaaagcgttggaaattgatgaaatgctcgaaggccatctgacacagcttttaaaagagggtgatgtctctgcgaaaccgaatcaagtatcaaaagtattccctccatcttctgcgggtatgaaacggatttatttcgttggtctggggagagaagcaaattattcgtttgaacaggcgaaggaacgttttgctcatgtttttcaagccattcataaagatcgaaaacaagaaactgctgtcctgcttgatacgtttatttcggaagacgtgcctccagccgatgccgctcatgctttagctgagagctgcctgcttgcttcctatgaggtgcaggattataagcacaaatcaaatgagcctgacaaacaaattgaagccgtgtatgttgtaacagatgaagatacacaggaagtgcaggcggggcttcgcgtcggccaggcatacggacaagggacaaattcggctagaacgcttgtgaatatgccgggaaacatgctgacagcgactgacctcgcttcgtatgctgaagagcttgcggcgaaatatgattttgagtgtgagatattggagaaatcagagatggaagagctcggtatgggcggaatacttgcggtaaaccaaggctccaccgaaccgccgaaaatgattgtgttgaaatatcagggcaaaaaggaatgggaagacgtcgtcggactagtcgggaaaggaattacctttgacacaggcggctactccattaaaacgaaatctggaattgtcggcatgaaatcagatatgggaggagcagctgcggttctcggcgctatggaaacgatcggagagcttcgtcccgagcaaaacgtgctggccgttattccatcaaccgataatatgatctccggcggggccatgaagccggatgacgtgatcgtatctttaagcggaaaaacaatagaaatccttaatacggatgctgaaggaaggctagtgcttgcagatggcattacatacgcgaaacagcatggcgcatcagttcttgtcgatgtagctacgcttaccggcggcgtcgttgtggcattaggaacagaaacaaccggtgcaatgacaaatgatcaaagcttttaccagcaggtagctgatgctgcacaagagtgcggagaggcgatctggcagctgccgataacagagaaggataaaaaacgcgtgaaaagcagccaaatggcggatctcaacaattcaccgggacgcgagggacatgcgattatggcaggaacgtttcttggtgaattcgctgagtcaacaccttgggttcaccttgatattgcaggcacagcgactgccaataaagcaacctgcttcgggccggccggggctactggcgttatggcaagaacactggctacacttgcggagcgatttacattggaagaagttaaaaacgagtaatgaaaaatccctgctgttatgatgcggcagggattttttcttccgaaatctttagttgactaaagtggatcggttatgatacgatacgttcgtactttatttatctactacattagcaaactaaaggatttttggaggggtatcatcatgaatgcagtcgtcatcgcagtcctgcttatgcttgtattaagcctgctgcgtgtcaatattgttatcgcattaattataggcgccttggccggcgggttaacaggcgggctcggtcttggcgaaacggttaaagctttcacagacggtctcggcggaaatgccaccgttgcagtcagctatgccatgcttggcgcgtttgccgccgctttgacgaaaacaggtcttccggacgcaatggtggaagcctccgttaaattaatcggaaataaagaagattctcgaaaaaaagcactgtctaaggtgctgattgtgctgattattttaattgtatcttgtttttcgcaaaacgtcgttccggttcacatcgcgtttatcccggtgctgattccgccgcttttgaaaatctttaatgaacttgaaatggaccgccgtctgatcgcgtgtgtaattacatttggcttaacggctccttatattttgcttccggtcggtttcggccaaatcttccagggcatgctgaaggacaatatggcggatgccgggttaaacgttccgcttgctgacattccgtacgcactgattattccagttgcaggtatggttgtcggccttattttatcagtgatcgtataccgtaaaccgaaacaatatgaaacaaaagacatttcaggtgcagaagcatcgccatatacgagaaaaagtattggtatcgcggttctagccattgttgtgtcactcggcgtccagctttacttatctcagactttgggagtggaaggaatgattatgggggcgctcgctggtctgattgttctgtttgtcagcggtgtgatgaagcgtgatgaagcggactcactgattactgatggaatggttttaatggcctttatcggctttgtcatgcttgttgcagccgggttttcaaacgtattgacgaaaaccggagatgtcgagtcactggtcaaaacgtcagccggttttatcggacacagtcagtccttgggcgcattgctgatgctcattgtcggcttattaattacaatgggaatcggatcttcttttgcgacgattcctgttatcacaaccatctttgtgcctctatgcatgcagctaggattcagcccgatggcaacgattgcgattatcggggctgctgctgcgcttggcgatgccggttcacctgccagtgacagtacgcttggaccgacttcaggtttgagtgcggacggccagcatcaccacatttgggatacttgtgtgccgacatttatattttataatattccgcttgtcatctttggctggattgcagcgcttgttttataggaaaaaggctcccctttactggggagccttttctcgttatgataaaaaaaccgtccaatagaacggttttttacgtagatgatatgtgatttctgttaaagccggttgctttatgaatagagcggtagattgctggtgcgataaacgacagtatcacagccagcgctgtatcttttaccataaaccaaatcataaagccccaagccgtgccgtagctcactggcgtatgaatccacagcttcagtgcaagatacatataggtagtgccgatgagatacatgatcgccgttccgataagtgaagcaatgagaaatcgaattttacttggctgaatgtttcgttctaaaaaccatcccgctgcaaatgctgccgggatgtatgagataataaacccgccgcttttccctgcaaacggtgcgaagcctgctgaaaattgagcaaacacaggcgctccggccaatccgacaagtgcatatacaatcatggcaatcgctgctcgtttgctgccaagaagcaaagcagccaagagacagaaaaacggctgcatcgaaagcggaatgccggctacttgtaaaaagggtgctactgatgtaatgttggccccgacagccataagtgcggagaacatgccaatcagcgccatatctcccgcacgaagtttacgttgtttcatcgttgttcccccttaggttgacatacacaatcatagagtaataaagaacaaaaatattgtcaacaaaattttaaattaggttaacaaaaaggaggcccatatgtatttcggaaaaacaaaacagtccgatcaatctggaagagtgccgccaaatcaaaacgtcaccacttcatttcctgtgcttcataccggagatgtcccatattacgaagatatgacgaaatggaatcttcaagtgtacggtttggttgaccatccgatgctgctaagctttgaagatgtcaaagcctttccacggtatgaatcgaaaaatgacattcattgtgtcacgggatggtcaaggcttgataatgtgtggcaaggcgtgcgggcttgtgatatagcggaaaaagcgggtgtaaaagaagaagcgggctacgtcattttacatgctgaagagggctggacgaccaatctgccgcttgatgatttcttagcggaaacttcccttctggcttatgcgcataatggcgaacctttaacccctgaacacggctttccgctgcggggtgtatttccgcatctatatttttggaaaagcgccaagtggctgcgcggtatccaatttacgaaagaaaatcaccctggcttttgggagcggaatggttatcacatgagaggcgatccttggcaaaatcaaagatttacatgggattaaggttctatttaaataggacaatccgcatctttattaggtttttatttccatattgttagtctgcaggtaccttatttgatcaaggtgccttttttatgcgggaaaaagttgactttctttggaagaaaacctattatttgaggtgtctagttgatagtgaaaatcattatcatacattgcggtttagtttaaggagaggaatgtcgtactgcatgaaagagcaaacaacagaccggacaaatggcgggacatcaaacgcatttacgattcctggtacggaagtgcgtatgatgtcttcacgcaatgaaaaccgtacctatcacatttttatctcgaaacctagtacgccgccgccacccgctggttatcctgtgatttatctgctggatgccaattctgtcttcggaacgatgacggaagccgttcgaatacagggacgccgacccgaaaaaaccggggtgatccctgcagtgatcgtcggcattggctatgagacagcggagccgttctcttcagcacgccaccgggattttacaatgccaacagcccaatcgaagctgccggaaaggcccgacggcagagaatggccggagcatggcggagcggagggctttttcagatttattgaagaggatttaaaaccggagatagaacgagattaccagattgataaaaaaagacaaacaatctttggccattcgctcggagggcttttcgtgctgcaggtgctgctaacaaagcccgatgcgtttcaaacctatatcgcgggaagtccgtccattcattggaataaaccgtttattctcgagaaaacggaccatttcgtctctctcaccaagaaaaacactcagcctatcaatatcctgcttgccgcaggagaattggagcagcatcataaaagccggatgaatgataatgcaagggagctttatgagcggctggccgttttatctgaacaaggcatacgagcagaattttgcgagttttcaggagaaggacatatttcagttcttccagttttggtcagccgggcgctgcgttttgcgcttcaccctgacggaccgcatctatcaatgggctgagacatactcagccttgccctctaaaaaaatatttgtcactgaaattatatttgactgtcacatgacatttggatatgattatttttataattgataatgataatcattatcaatggattgcgtttttcaaggcgcagcagtctttttcgctggatgtctgttcggcatttagagcgaagaaaggaattgatgatatgaatgcaaagagtatagagggaaaaattgcttttataacaggggctgcccaaggaataggcgaagctgttgcgcggacgcttgccagtcaaggcgcacatattgcggcagttgattataatcctgaaaagctggaaaaggttgtgagcagcctcaaagcagaaggccgccatgcagaagcttttcctgcggatgtgagagacagcgcggcgattgacgagatcacggcgcgcatcgaacgtgaaatggggccgattgatattttagtgaatgtagcgggtgtccttcgcccgggactgatccattcgcttagcgatgaggaatgggaggcgacgttctcagtgaattcgactggcgtatttaacgcctcgcgttcagtcagcaaatatatgatggaccgaagatcaggttcgattgtaacagtcggatcgaatgctgccggtgtgccaagaacatctatggcggcatatgcgtcttcaaaggctgcggctgtgatgtttacgaaatgccttggccttgagcttgcagaatacaatattcgctgcaacattgtatctcccggatcaacggaaactgacatgcagtggtcattatgggccgacgagaatggagcggagcaagtcataaaaggatcacttgagacatttaaaacagggatcccgctcaaaaaactagccaagccttcggatattgcggatgcggtgctctttttggtttctggccaggcagggcatattacgatgcataatttatgcgtagatggcggcgcgaccttaggcgtgtaactgaatttaaaggaggttcatgagaatgttggatcaaaacgttataacagaaacaaaagcggagcatttgcttcatgaatatcagccgggcgcctttttcttagcgtctcctcatcgtgtactgttagcgaaaggtatatgtgaaatcgtaccggaggcagacgggcaaaaccaaatggaaaccctttctggccgaattgcagagacgctgcgtcaggcaaaacaatcagggcaaagccggccgcttgttgtcggggccgttccttttgatcaagtaaaagcagcgcggctcgttgtacctgaagaagtgcgctggtcaggaccgcttcaatttgatcatgaggaaaaggaacagcaggctgggcatacataccacataaagcctgttcctgaacctgaggattataaaaatggtgttgaacaagggctgacacgcattgccgatggaacactcagcaaaatcgtcctgtccagatcgctgcatttgacatcgcctgaaccgattcagacggatgaattgcttcgccatctggctcagcataactcgcatggctacacgtttgccgcagacgtgtccagtcaggaggaaacgtctccccgccgaacattgctcggagcaagtccggagctactcgtttcaaggatgggaacacaggtcgtttccaacccattagccggctcaagaccgcgcagtaatgatcctgttgaagaccagcgccgggcagctgaattgctttcttccgcaaaggatcttcatgagcacgcggttgtcgctgacgcggttgcggcagcgctgagacctttctgccggacgctggaggttccggagaagccttcactgatcaaaacggaaacgatgtggcacctgtccagcgtgattaagggagagctttccgatccgtctgtaaccgcacttgaattggcggcggcgctccacccgacgccagccgtctgcggaacaccgactgatcttgcaagagaagcgattctcagcattgaaccatttgaccgcggtttctttaccggcatggtcggatggtgtgacgatgccggtgacggagaatggatcgtgaccatccgttgtgcagaagcagaagaacgctctctccgcctgtatgctggagctggtgttgtggccggttcaaagcccgaggacgagcttcaggagacgtccgcaaagtttcggacaatgctgcgggcaatgggcgtggatcacatatgaacagaatgaattgctggagggatgcaacatgctgaaaggatttacgccttggcctgatgagttagctgagacctatcgaaagaatggctgctgggccggcgagacgtttggggatttgttaagagaccgggcagccaaatatggcgaccgcattgcgattacatgcgggaacacccattggagctatcaagagcttgacacaagggttgatcgtttggctgccggatttcagaagctcggcattcaacagatggatcgtgtcgtggtgcagctgccaaatatcaaagagttttttgaagttattttcgcgctattccgtctgggggcgcttccagtcttcgcactgccttctcatcgaagcagtgaaattacatatttttgcgagtttgctgaagcggctgcatatatcattcctgacgcttattccggttttgactaccgtacgcttgccagacaggttcaaagcaagctgccgactttgaaacacgtcattgtcgcaggtgaggcagaggaatttttgccgctggaggatttgcatacagaacctgtaaaactgcctgaagtcaaatcttcggatgtggcgttcctccagctttctggcgggagcaccgggctatcgaaactgattccgaggacccacgatgactacatatacagcctgaagcggagtgtggaggtctgctggctcgaccacagcacggtgtacttggccgcgctgccgatggcacacaattatccgctgagctcacctggcgttctcggcgtattatacgctggaggaagagtggtattatctccttctccaagtccagatgacgcatttcctttaattgaacgggaaaaggtcacgataaccgctcttgttccgcctcttgcgatggtatggatggatgcggcatcctcacgccgtgatgatttatccagccttcaagtgctgcaggtcggcggtgccaagtttagtgctgaagccgcgcgcagggtaaaagctgttttcggctgcacgctgcagcaggtgttcggaatggcagagggtctcgtcaattatacgagattggatgatcctgaggagatcattgtcaacacccaaggaaaaccgatgtccccatatgatgaagtgcgtgtttgggatgatcatgatcgcgacgtaaaacctggtgaaacaggccatctgctgacgcggggaccgtatacaattcgaggttactataaggcagaagagcataacgccgcttcatttactgaggacggtttttaccgtacgggtgatatcgtcaggctgacacgagacgggtatattgtcgttgaaggccgggcgaaggatcaaattaaccgtggaggagaaaaggttgcggctgaagaggtagaaaatcatctgctggcgcatccggctgtccatgatgcagcaatggtctccatgcctgatcaatttcttggcgaaagatcttgtgtgttcattattccccgggatgaagccccaaaagccgcagagcttaaagcatttttgagagagcgcggactggcggcatataaaatccctgaccgagttgaatttgtcgaatcctttccgcagacaggggtaggaaaggtaagcaaaaaggctcttcgtgaagccatttccgagaaacttcttgcagggtcaaaaaaataaatcaacaatttgagaggaagtgttcatatggctatacctgccattcagccgtatcaaatgccgacagcgtctgatatgccgcaaaacaaagtctcatgggtgcctgatccaaatcgggcggtcctattaatacacgatatgcaaaactattttgtcgatgctttcacagcgggagcgtctccggtaacagagctttcagcgaatatacgaaagctgaagaatcaatgtgttcagcttgggattcctgttgtctataccgcacagccgggaagccaaaatcctgatgaccgtgcgctgctgacagacttttggggcccgggattaaacagcggtccttatgaggagaaaattataaccgagctggcaccgaaggatgatgatcttgtgctgacaaaatggagatacagcgcgtttaagagaacgaatctgcttgaaatgatgcgcaaagagggacgcgatcagctgatcattacaggaatttacgcccatattggctgtcttgttacagcatgtgaagcatttatggaggatattaaagccttttttgtgggagatgcagttgctgatttttcattagaaaaacatcaaatggcgctggactatgcggctggacgctgtgcgtataccgtgatgactgacagtcttcttgatcagctgcagaatgcgccggcagacgttcaaaaaacgtcagcaaacactggcaaaaagaacgtgtttacatgtgagaatatccgtaaacaaattgcagagcttctacaagaaacaccggaagacatcacagatcaagaggatttgctcgatcgtggtcttgattcggtaaggatcatgacattggtggaacaatggcgccgtgaaggggcagaggtgactttcgtggaattggctgaacgcccaacgatcgaagaatggcaaaaattgctcacaacccgcagccagcaagtgctgccaaacgcggattatttataaaaggagggtaaacaaacggatgcctgatacaaaagatcttcaatattctttgaccggggcgcaaactggcatatggtttgctcagcagcttgatccggacaatccaatctacaatacagcggaatatatagaaatcaatggaccaatcaatattgctctttttgaagaagctttgcggcacgtgaccaaggaagcggaatcgctgcatgtccgcttcggtgaaaatatggacgggccttggcagatgataaacccgtctccggatgtacagctgcacgtcattgacgtcagctctgagcctgatccggaaaaaacagcattaaactggatgaaagctgatttagcaaagccggttgatttagggtatgaccctttgatcaatgaagctctgtttattgccgggcctgatcgtttcttttggtatcagcgcattcaccatatagcgatcgacggcttcggtttttccctgatagcccagcgtgtggcaagtacatatactgcgcttataaaaggacaaacagctaaaagccgttcctttgggtctctcaaggccattttggaggaggatacagattatcgcggatcagagcagtatgagatggatcgtcaattctggctggaccgttttgcagatgcacctgaagttgtgagcttggctgatcgggcgccaagaacatctaacagttttcttcgtcatactgcatatctgcttccgtctgatgtaaacgcgttaaaagaagcgtcgcgctatttctcaggaagctggcatgaagtcatgattgcggtgtcagctgtttatgtgcaccgtatgaccggctctgaggatgttgtgctcggcctgcccatgatgggtcggatagggtccgcgtcactgaatgtaccggctatggtgatgaaccttctcccgctccggctgacggtaagctcttcgatgagcttttctgaactgattcagcaaatttcccgggaaatccgcagcattcggcgacatcataagtatcgccatgaagagcttcggcgcgatctgaaattgataggagaaaatcatagattatttggccctcaaatcaatcttatgccgtttgattacggtctcgactttgccggcgcccggggcacaacgcataatctttcagccggtcctgttgatgatctatcaatcaatgtatatgacagaacagacggcagcgggctgcgaattgatgttgatgcgaatcccgaggtatacagtgagtctgatattaagcttcatcagcagcgtatcctgcagctgctgcaaacggcttctgccggagaggacatgctgattgggcaaatggagcttctgttgccagaggagaaagaaaaagtcatttctaaatggaatgagacggcaaaatccgagaagctggtcagccttcaggacatgttcgaaaagcaggcagttcttacgccagaacgtatcgctctcatgtgtgatgacattcaagtcaactatcgaaagctcaatgaagaggcaaaccgcctcgcgcgtctgttgatcgaaaaagggattggtccggagcaatttgtcgctttggcgctgccgcgttcccctgagatggtggcctcaatgcttggtgtgctcaagactggtgcggcgtatctcccccttgatccggagtttccagccgaccgcatttcttacatgctggaggatgcgaaaccttcatgcatcataacgactgaggaaatagcagccagtctgcctgataacctggctgtaccggagcttgtgcttgatcaggctgttacacaggagattataaaacgctattcgccggaaaatccggatgtaccggtttctcttgaccatcctgcgtatatcatctatacctcaggatcaacaggaagaccgaagggtgtcgttgtgacacagaaaagcttaagcaattttctgctgtccatgcaggaggcattttctctaggagaagaagacaggctgttggctgtgacgactgtcgcttttgatatttcagcattggagttatatcttccgctgattagcggagcgcaaattgtgatcgcaaagaaagaaacgatccgtgagccgcaggcattagcccaaatgattgaaaatttcgatattaacatcatgcaggcgacaccgacactgtggcacgctttggtaacgagtgaacctgagaaacttcgggggcttagagtgcttgtaggaggcgaggcgctgccgagcggtcttttgcaggcgcttcaagaccttcattgttcagtcacgaacttatacggtcccactgaaacaacgatttggtctgccgcagcttttcttgaagaagggctgaagggcgttcctccgattgggaaaccgatttggaacacgcaggtgtatgtgcttgataatggattgcagccggtgccgccgggcgttgtcggagagctttatattgcaggaaccggcttggccagaggttatttccatcgtcctgatttaacggcggagcgcttcgttgcagatccatacggaccgccgggaactcggatgtatcggaccggagaccaggcccgctggcgcgccgatgggtctttggattatatcgggcgggcggatcatcaaatcaaaattcgcggattccgaattgaacttggagaaattgatgccgtgcttgccaatcacccgcacattgaacaggccgcggttgtcgtacgggaagatcagccgggagacaaacgattggcggcttatgtagtcgctgatgctgctattgatactgcagagcttcgtcgttatatgggggctagtcttcctgattatatggtaccgtcggcgtttgtggagatggacgagctgccgttaacacctaatggcaagcttgaccggaaagcactgccggcaccagacttcagcacatctgtcagtgatcgggccccgcggactcctcaggaagagatattgtgtgacttgtttgcagaggttctcggtttggcacgcgtcggtatcgatgacagtttcttcgagcttgggggccattctcttcttgcagcccgtctgatgagccgcattcgcgaggtaatgggagccgaacttggtatcgccaagctctttgacgaaccgacagtagccggactcgctgcccatcttgatttggcgcagagtgcacgtcccgctttgcagagagctgagcggcctgaaaagatcccgctctcatttgcccagcgccggctatggttcctgcattgtctggaaggaccgagtcctacttataatattccggttgctgtccgtttgtcaggtgagttggatcaaggattgctgaaagcggcactttatgacctcgtccgccgtcatgaaagtcttcggacgatcttccctgaatcacaggggacatcctatcagcatattttagatgccgatcgagcctgtcccgagttacatgttactgaaattgctgagaaggagctttctgatcggcttgccgaagctgtacgctacagctttgatcttgcagctgaacctgcttttcgtgccgagctttttgtgatcggtcctgacgagtacgtgctgcttcttctcgtccatcatattgtcggggacggctggtccttaacaccgctgaccagagaccttgggacagcttatgcggctcgctgccacggacgatctcccgaatgggcgcctcttgctgtgcagtatgcagactatgcgctttggcagcaagaactgcttggaaacgaggatgatccaaatagcttgattgccggacagcttgctttctggaaagaaaccttgaaaaacctgcctgatcagcttgaactgccaaccgattattcacgtccggctgagccgagtcatgatggagatacgattcattttcgtattgagcccgagtttcacaagcgattgcaggagctggctcgcgcaaatagggtgagcctgtttatggtgcttcaatccggtctcgccgctttattgacaaggctcggggcgggcaccgacattccgatcggcagtccgatcgcgggacggaatgatgatgcgctgggcgatcttgtagggctgttcattaatacattggtgctcagaactgatacgtccggtgacccaagctttcgtgagcttctagacagagtacgggaagtgaatctggccgcctatgacaatcaggatctgccgtttgagagacttgtagaggtgctcaatccggctcgttcgcgtgcgacgcatcctttattccaaatcatgcttgcgttccaaaacacaccggacgctgaactgcatcttcctgatatggagagcagcctgcgaatcaacagtgtcggttctgccaagtttgatttgacgctggaaattagtgaagatcgccttgctgacgggacaccaaacggaatggaaggactgcttgaatacagcactgatcttttcaagcgagaaactgctcaggctcttgctgaccgattgatgcgcctgttggaggctgccgagtctgatcctgacgagcaaatcggaaatctggatattcttgcgccagaggaacacagcagcatggtgactgattggcaaagtgtatctgaaaagattccgcacgcatgtttgccagagcaatttgagaagcaggctgctttacgtcctgatgccattgccgttgtatatgaaaatcaggaactgagctatgcagagctgaatgaaagagcaaaccggcttgcccgaatgatgattagtgaaggtgtcgggccggagcaatttgtggcattggcactgccccgatcgttggaaatggctgtcggcctattggcggtgctaaaggccggggcagcttatctccctcttgatccggattatccggctgatcgaattgcttttatgctaaaagatgcacagcctgcgtttatcatgacgaacactaaagctgcaaatcacattccgccagttgaaaacgtgccgaaaatcgtgctggatgatcccgagctggcagagaaactaaacacgtaccctgcaggtaatccaaaaaataaggataggactcagccgctttcccctttgaatacggcatatgtcatttatacatccggctcaacaggtgttccaaaaggtgtgatgattcctcaccaaaatgtaacacgtttatttgcagcgaccgagcactggttccgtttcagctcagatgatatctggaccatgttccattcctatgcgtttgatttttcggtgtgggagatctggggtcctctgctgcatggcggacgtcttgtaatcgtgcctcaccacgtcagcagatcgccagaagcgtttctgcgcctgcttgtcaaagagggggtgactgttctgaaccagacaccgtctgctttctatcagtttatgcaggcggaacgggaacagccggatctcggacaggcactcagtctgcgctatgtcatttttggcggagaagcgcttgaactcagccgtttagaggattggtacaaccgccaccctgaaaatagaccgcagcttatcaatatgtatggtattacagaaacgacggtgcatgtgagctatatcgaattagaccgaagcatggcagctttacgggcaaacagcttgatcggctgcggcattcccgatcttggtgtatacgtgctggatgaacgcctgcagccggtcccgccgggtgttgccggagagctgtatgtatcaggagcggggttagcacgaggttatctaggccggcctggtttaacatctgaacgcttcatagctgatccgttcggtcctccaggcacccggatgtaccgcactggggatgtggcccgcctccgcgctgacggttctctcgactatgtcggccgtgcagaccatcaagtgaaaattcggggattccggattgaattgggagaaattgaagccgcgcttgttcagcatccgcagcttgaagatgcggcagtgatcgttcgtgaggatcagccgggagataaacggttagcagcttatgtcatcccttcggaagaaacatttgatacggcggaactgcgcagatatgctgctgagagactgccggattacatggtgcctgctgcctttgtgacgatgaaagaattgccgctgacaccgaatggaaagcttgatcgtaaagcgctgcccgctccggatttcgcagcggcagtgacaggacgaggaccgagaacgccgcaggaagaaattctctgtgacctctttatggaggtgcttcacttgccgcgtgtcggcattgatgaccgtttctttgatttaggcggacattccttgcttgctgtacagctcatgagccgcattcgtgaagcgctcggcgttgaactcagcatcggcaacttgttcgaagcacctactgtagccgggctcgctgaaagacttgaaatgggatcaagccaaagcgctcttgacgttctgctgccgctccgaacaagcggagacaagcctcctttattctgtgttcatccggcaggggggctcagctggtgttatgccggtttgatgaccaatataggaacagattatccgatctacggcttgcaggcacggggaatcgggcagcgcgaggagcttccgaaaacacttgatgacatggctgccgattacattaaacaaatccgaacggtccagccaaaaggcccgtaccatctgctgggctggtccctgggcgggaatgtcgttcaagcgatggctacccagctgcaaaatcaaggagaagaagtttccctattggtgatgctggatgcctatccaaaccacttccttcctataaaagaggcgccggatgatgaggaagcgcttattgcccttctggcgttaggcgggtacgatccggacagcttaggggacaaaccgctagattttgaagcagcgattgagattcttcgccgtgacggcagtgcgcttgcgagcttggatgaaacggtcattttaaatttgaagaatacgtatgtcaattctgtcggcattttaggctcctataagccgaaaaccttccgtggaaatgttttgtttttcagatcaacaatcattcctgaatggtttgatccgattgaacctgattcgtggaagccttatattaacggacagattgaacaaattgacatcgactgccgtcataaagatttatgtcagccggaacctctggctcaaatcggcaaggttctcgctgtcaaattggaagagttgaataaataagggaggagaaatagaatggcaaatccttttgaaaatgcggatggcacgtatttggtgctgatcaatgaagaaggccaatattccctatggcccggttttatagatgtgccgagcggctggacagtcgttcatgagcaaaaagggcgtgaagcttgtttggactatatccaatcgcattggagcgatatgaggccaaacagcctaaagactgttgaaaatgtgtaatcgtatcaaaaagagactgctcgccgcagtctctttttctatcttacgcagacgtttgggtatgatcacaatccctgaccgggtttccgttttcatcggtacaccaagattgggataaaaacgctaaaaacacagcggcccactgatctgcaaactgaatcagaatacccccgtcatgccaagagccgttgtcttttttccagcgggtatccattgcattcccttgattcatatggatattgtgcattccgttggtcggggtaaagccgaatattttatctgcagcccgttcaggtccgaattttgaaccaaatatataaaccggcgctttctcatcttgtgctttcttcatataggtttcaataaaatcatttaaatcattatcaggtcccgtgatttcatgaggcaaaggcttcatttcccgcgggtcaaacaaattgccccgcacataatccagggtcacttcacggtttgcttcattgatccttgtatatccatacggcatgttcggaaggatggtaattgagcccgaatcaaactgatcgtcagccaaatacaatacttcagattcctcagaactggacatcacattgatggcgcacctgtaatacgtattctcttcaccgagcattttgacttggaaatgaggactgtcatcatctgtttcccgcttcatgtctaagactatgccttttaacacgccatattgctgaacagccatatgaatcctcctttatgatcaacttcatagtcataattcgtgaaatggtctcttttttccttttaaaaaataaaaaagcctgcagaaatctttctgcaagctcattgtgaattaagcacccgccacagatgactcatcctgtaaagctttctcggcaggaacatactcatagcctagatctcttgctacagcttcataggtcacgtgtccgtttgcggtgtttaaacccgctctcagtgccgcattgtctgcgagcgcttttactgcccctttgttcgcgatttgcagcgcgtatggaacagtaacgttagtcagggcgattgttgatgtacgagggacagcacccggcatgttcgctacagcataatgcacaaccccgtgcttttcatatgttggctgatcatgtgttgtgatatggtcgacagtttcgacgatgccgccttggtcgatcgctacatcaacaatgactgaaccaggtttcatttgttttaccatttcctcagtgacaagagtcggagctttagcgcccggaattaataccgcgcaaatgaggagatccgcttccgccacagcatcagcaatattgaccggattagaaattaacgttttaatctgatggccgaagatgtcatcaagctggcgcaagcggtctgcgtttaagtcaatgatcgtcacatctgcaccgagtccgacagccattttggccgcgtttgtgccgacaacgcctcctccgataattgttacttttccgcgggaaacgccaggcaccccggcaagcagaatgccttttccgcctttaggcttttctaagaattgagcgccgatttgcgccgccattctgcccgcaacctctgacattggcgtcagaagaggcaatgtccggccttcactgaccgtttcatatgcgatagcagttactcctttatccttcaaggcctgtgcaagctcaggctcagctgctaaatgaaggtacgtaaacagcacaagtcctttgcggaaataaacatattcttccggcagcggttcttttaccttcatgaccatttcggcgtcccagacctgtttcggatcagcaatgatttccgctcctgctgactcataggcttcattttcaaatccgcttccaaggcccgcgcctgtttcaaccagcacccggtggccgtttgaaatgagctgagaaacgcccccgggtgttaatgcgacacggttttcattgttttttatctctttaggaacccctatgatcatatctgtctcctcctgtatctgtgatatttttagtgtagcttgatattttggaaaattctttgtttgattaagaaaataaaaaaacatggatttgtgaaatttcacaaatccatgtgccgaagtttgatatctaaatagatggtgaatttttgattcgcatttttcaaatcaatttcagcgatctggctgatccgcttgagtcggtaattcagcgtattaacgtgtatatttaacagcttggaagccgtattcacgttgctgtccgcttcaataaagcgctctagcgtctctaccagatttgactggtgatcccggtcatattgttccagtttggaaagcgagtaattataatggcccgcctgtttccgtttttcatttaagacatctaagtattgataaatacctaactcagaaaagctgaaaaaatgtttggtctcttcagcgaaccgttccttcgtttttaagacggacaatgcttcctgataggagcgggagacaaaagaaatagagttgtatattccgccaaaagcgatagaaacgtcttctattttataccgctccttcagctgtttttgcgtacttaaagcaaactgttttaaatcttgaaaaggatgatctgttttgggtgaggttaatataataagttcattggaatctacggtcgccagcagcacgtaaacctgctgggtcgtttcctgtaaatattgcagctgctgttcgattttttcagtcagctcgccatttatgcggatgatcataacggaaaactctgaaggagcggccattccaagcttatggaacccatccgccatatcatcctcctgatggatgtgtccggtcagcattttccagaaaaattcttggctgcgttcttcatttttcgtttttctgatttgaagtttgagaagcttgtttttcactgcttttgctgccatttgcaatgtcagcagatcttcatcggacaatgttttttggatctcaagagcccatatgaagccaagcacttgcttgtttttccaaatcgaaatagcgacgcgattgctcagcccgacttcatcaatttgcttgactctgatcggctggtccgtttttaagagagctggaattgtcccgtctttccacaacttgttaatcaccttctccggtacccttctgccaataatggtagacgtccgggcagggtctgtgcagtcgctgtgtgtactgtaggcaagcagcttgtggttaacatcctctatggtgatcgggcaccgcagaacgtcgctgatatgatcagccacatcttcaagtctgtcaaaactatatttaaacggatcattcggcatggtcataaatctccctacttttcgtacttgatttctctttgacatctcatccccttccttttattatgattgttgttgtttgtgaaaatcaacaacaaagaacagaagcaaaaaaacaatttcatgagagaaacgttctatatacatttggcggtgtaatcgcctttttgcaggacagttgtatgcctcatataatacgacagcttatcctattaatcttttaagtaagtcatcggaggcgagactaattaaggaaagaaaaaactgaacctttcagaaatggtgctgtagcatcaaattttctgaaaggttttttttgggagttggggagttatttgggtcttttggattattcggagaatgaagaggagattaagaaaataaacctatttactttacagtttatgtcatttttaagtgattcggggtaaaccattggactcattttgtaaaattaaaacatatttgtttgactatgccgaaaaactgtttttataataatgacgttctaaaaataagtgaattagcccatatttaggctgatggcacaggaggtaatgaggaatatggcaggattaattcgtgtcacacccgaagagctaagagcgatggcgaagcaatacggcgttgaaagccaagaagtattaaatcaggttgatcgtttaaaccgaatgatctctgatttgaaaagcatgtgggaaggtgcttcaagcgaagcgttcgcagatcaatacgagcagctcaaaccttcatttatcaaaatgtcagatttgcttcaagatgtgaatcagcagcttgatcaaacagcaaatacacttgagtctactgaccaagacatcgcaaatcaaatccgcggataacagtatgaaagggaaggagcgcctgattcaaaagaagacggcgctctttctatgtaagggtgatcctaaatgtatattgatattacaatagatttgaaacattataacggcagtgtctttgatctcagattgtcagattaccacccggtgaaaaaagtaattgatattgcttggcaggcccaaagcgtatctatgcccccgcgcgaagggcactggatcagagtggtgaacaaggataaggtgttttccggagaatgcaagctgtctgattgcggcattacaaacggagaccggcttgaaatattatgaaaggatctggttgaatgtcaggtaaacaaaaatcatatttagaaaaccaattagaagctgttgccgagaaaacagatgccggctatacatttacctttcaacgggaaaaaataaagcttctcgacggtcttgaagctaacgtgatcaaagatataaatccatttttttataaagaaatcgatgtgacggatgatgaagtaatcatcacaatccaacctccctcctcctataaagcattccgcttcatgaaagctaaggataaaaaaagtaaatggcagtttgcctatcagcttgttcaagccgtacagcagcacaatctgtcgaggctgaatttgattgtcgctcctgaaaacattgtattcgataaagggcttacgccttattttctccattatggagtaaaagaaagcattcctccttacgagcgtgatgaggaaagagtatggcaggagctaaaagcggcagcggctttggcagttgacggcgcttttgcgtttgaagactacctgaaattcaatgaaacgctcacgttctccgcagaggcaaaggcgatattagatactgaatcctatgatgatttgctcgagctgattcaaatccatattgatgagctcgaagccaaagcaaaaacatacatacatatcccgagaaagaagtggaacatccagcgatatatcggcctggggctcattgttttgcttgtaccggcacttatttattcgatgtacgccttatttttcgcgcagccaaagcaccaggcgatagtggacagcaaccgtgcgttcttaaacaagcagtacagtgaagtcatcagcacactgtccaagtacgaggcggaaagcctgcctgaatcggtgcagtatcagctggcgacgtcctatgttgaggtcgaaaacctggggagtgcaaaaaccaaaaatatagaaaataacttagtcacccttcaatcagaccctcagcatttcttatattggattgattatggtagaggagaatacaaagaagcgatcagtatcggccgtaagcttgaatacaatgattatatttactttgccctagctaaatataaacagcagcttttatctgaggatacaaatgatgaagatatacaaaaagaacttgactcagtaaatagtgagcttgaaaaagcccaaaaagaacgtcaagaaaataaacagtctaattctgaaacatcgttagtcgatacaagcgaagaacagacacaaacagacgaagaaaaacaagcagaagagaaagcggcagaagaaaaagccgcagccgaggaaaaagcgaaaaaagaagaacagaagaaaaaagaagacgagaaaaaagaaacagaaaagaaagatgagaaaaaagatgacaaataacgtgagacatgaagcacaggtcatcgcatgctgccattcggccgtaagggggttcgccatttgagtctattatgggttttttaccaaaataacgttcaaaaattaaatctgtctaacctcccgtcgtctcatccggtgaccatagggcctgatgtgaaggattctgttacgatcagctccattccatttaatagcggagtggtttctcttaaaagaaaggaatccggcggccaatacgaagttttcctgggaaatgattgtctcggcacgattgaggcggatacatcatttactctccaaacggatcagcaggatatacgtttgatattgacaggcagtgaacctgagaaatccgtttattttacgggaaatcgggatgaaattgtatgttcctcagaaaaaacgaatgcagatatttatctgaatccgcaagattttgcatttgcagaacaaagcacgttttctttgcttcgtgcaggcggcagctggtcggtccgccctgaaagcggaacgatcttcttgaacggagagaaaatcaacgccaatacgccgctcaagccgggggatgaaatattctggaacttcacgcaaatgagggtgacggaacaagaccttttagaaattgttcattatgcccagtttgaaacagcgttaacagaaacggtcaaaccgagtacagagatgcagaaaaaatatccgcagtacagaagaacgccgcggatggtatacgatctcccggatgaccgcgtttctttcagttttccctctcaggagagcgatcaaaccaacagagggctgtggctcgtcatcctgcctccgcttgtgatgctgatcgtgatgggcgtagttgccatcatccagccgcgcggcatatttatactcgtttctttggccatgtttatgatgactctaattacctcgacagtgcaatatttccgggataaaaaccagcggaaaaaacgcgaggaaaaacgggagcgtgtatataagctttacttagacaataagcggaaagagcttcaggcacttgctgaaaagcaaaagcaggttcttgaatttcactttccttcatttgaacaaatgaaatacttaacaagtgaaatcagtgaccggatctgggaaaaatcacttgaaagcaaggattatctgcaactgcggcttgggacgggaacagttccgtcaagctatgaaatcaatatgagcggcggagacttggcgaatcgtgatatcgatgacctcatggagaaatcgcagcacatgcagcgcgtctataaagatatccgccatgcgccggtgacggtcgatttggcagaaggtccgatggggcttgtcggtaaatcgcaaattgtaaaaaatgagattcaccagttgattggacagctgtcgttctttaacagctatcacgatttgcgttttgtatttatttttcatgaagaagagtataaagactgggagtggatgaagtggcttccgcaatttcaaatgccccatatttatgcaaaaggatttatttataatgagcaaacccgagatcagctcttgtcttcactttacgaattgatcagagagcgtgatctcgaagatgacaaagaaaaactgcagttcaaaccgcattttgtatttgtcatcacgaatcagcagctgatctctgagcatgtcattctcgaatatttagaaggacagcatgagcatctgggcatctcgacaattgtcgcggcggaaacaaaggaaagcttgtcggaaaacattacaactcttgtccgctacattaatgagcatgaaggcgacattttaatacaaaagaaaaaagcggtaagaattccgttccgtctcgatcatcatcagcgtgaggacaacgaacggttctcacgcacgctgcggacgctgaaccaccaggtcggcattacgaattccattccggaaacggtatcgttcctggagctttttcatgcgaaggaagtaaaagaaatcggcattcagcaaagatggctgacaagtgaatcgtcgaagtcgctgtcagtgccgatcggctataaagggaaagatgacattgtgtatctgaaccttcacgaaaaagcacacggtccgcacggcttgcttgcggggacaacgggatcagggaaaagtgaatttctccagacctacatcttgtcacttgcagtgcattttcatccgcatgaagcggctttcttactaattgactataaaggcggaggaatggcgcagccgttccgcaacattccccacctcctcggcacgatcacaaatattgaaggaagcaaaaacttcagtatgcgtgcgcttgcttccattaaaagcgagctgaaaaaaaggcagcgcctgtttgaccagtatcaagtcaatcacatcaatgactatacaaagctatacaagcaagggaaagcagaagtggcgatgcctcacttgttcttaatttctgatgagtttgccgagctgaaaagcgaggagcctgattttatcagggagcttgtcagtgccgcgcgtatcggacgaagcctcggcgttcatttgattttggcgacacagaagccaggcggcatcatcgacgaccagatctggagtaactcgcgctttaaagtagcgctcaaggtccaggatgccaccgacagtaaagaaattttgaaaaacagcgatgccgcaaacattaccgtaacaggccgcggctatttgcaggtcggaaacaatgaagtgtatgagctgttccaatctgcatggagcggggcgccttacttagaggaagtctacggtactgaggatgaaatcgctattgttacagatacgggtctgatcccgctttctgaggttgataccgaagataacgcgaaaaaagacgttcaaaccgaaatcgaagctgtagttgacgaaattgaacgcatccaagatgaaatgggaatcgagaagctgccaagcccttggctgccgccgcttgcggaccgtattccgcgcactcttttcccttcaaacgaaaaagaccatttccactttgcgtatgtcgatgaacctgatctgcaaagacaggcgccaattgtttataagatgatggaagatggaaatatcggcatcttcggctcttcgggctacggaaaatcgattacagccgcaacgttcctgatgagctttgcggacgtatacacacctgaagagcttcatgtctatatctttgatttcggaaacggaacgctgctgccattagcgaagctcccgcataccgcggattacttcctgatggaccagtcaagaaaaattgaaaagttcatgattcgcatcaaagaagaaattgaccgccgtaaacgtttgttccgggaaaaagaaatcagccacatcaaaatgtacaatgcgctgagcgaagaagagcttccattcatttttatcaccattgacaactttgacattgtcaaggatgagatgcatgagcttgaatcggaatttgtccagctttccagagacggacaaagcttgggtatctactttatgctgacagcaacgcgggtgaatgctgtccgccagtcattgttaaataacttgaaaacaaaggttgtccattatctcatggatcaatcagaaggatattccatttacggccgtccgaaattcaatcttgagccgattccgggacgcgtcatcattcaaaaggaagagctttatttcgcgcaaatgttcctgcctgttgacgccgatgatgatatcggcatgttcaacgagctgaaatcagacgtacagaaacttcaagggcgatttgcttcaatggagcagccggcaccgattccgatgctgcctgagagcttgtctacgagagaattttctctccgcttcaagctggaacgcaagcctttatctgtaccgatcgggcttcatgaagaaacagtcagcccagtctattttgatttaggcaagcataagcactgcctgattttaggccaaactcagcgcgggaaaacaaacgtcctaaaagtcatgctcgaacatctgattgatgatgaaactgaaatgatcggcctgtttgactcaattgaccgcggcttatctcattatgcgaaggaatcagatgtttcatatttggaaacgaaagaagatattgagcagtggattgaaacagcagaagacattttcaaaactagagaggccatgtatgtggaagccgtccgccaaggagacgcgcaaaatctgcgattctcacaagtggtgctgatgattgacgggataacgagattccagcagacgattgatacgagaatacaagaccgtctcgctaacttcatgaaatcatacgctcatcttgggttcagctttatcccgggcggaaatcacagcgaattttcaaaaggctatgactccttgacgactgagatgaagcaaatccgccacgcgattctgctgatgaaaaagtctgagcaaaatgtcattcctctcccgtaccaaagacaggagcctgagattcagccgggcttcggatatgttgtggaaaacgggaaggagcaaaaagttcaaattcctttatgttctgctgaaagggagagtgctagatgacagaacaacgaaaaagcttgatcaagttaatatccgccgtcatcatcattttgctgctgccggtgttgtttttccgatttatcggagacgacccaacgaaaaaagcagtcaattccacccgacaaatcgcggtggtgaatgaagacacaggcgtattgagtgatgaggtaaagtctgatgaagaggacaaatccgcccagttcggcaaggaagtagcggccgttctgggtgaacgtcctgattattcgtggacggtcgtaaaccgaagcgcggccgagaccggtctcgcttcaaagaaatacgatgcgattgtctacattccctcagacttctcaaaaaacattttgagctatgacaaagaccatcctcaaaaagcaacgctcgaattcagcattcaagataacctgaatgcggttaacaaagaaaaagttcagcgtgagcttgaggatgcccaaaagacaatgaacaaaaaaatgtcggccttatactggaattttgtttcacaaaaagtggacaacatcagaggagaatttgacaagatcgtcaataaagaatctgaattccagaatgtcatgtacaacttttacaaaccaagctctaatgatttagcaggtgaaatcaaacagcaaaaagacttaatcgatgagctgaagaaatcaatgaatgaagcgcaaggcacgacaaaagaaaaagcttctacagcggaggaagccaaaaatacgctgaaagaattcattgatacagttgaaagatacaaagaatatcaagaaaatcagaaaaagctgcttttggcagcccaagattcaacacagcagcaaatccggacaggtctggatgccatccaagcacagcaaaaggcgaatcagttcagcgaacgcatgagcggattggcaactgggattggccaagcgaagacacagctcggacttactagtcttgctctgaaaagtgcagaacagacaaggcaaggtcaagttcctttacaagaaatgggcatgaaaaaaattcaagaagatatgttcagtacatttcttgaacgttatgaaactcagtatactgcaactaaaatccaaaacttaaatcaattgcaagataagatagtgaatcttcgtccggctttaataaaaccagaggaagacgatcaaaagcacgataattctaatgaagagaataatgacaaggaagaagatacaactgaagaaatcaaattggacttggagcaacaacgagatgaactcaataatgttgcagctgaaatcaaagatatttctgaaggattaaaagaaccagaactaaataacccaacaatgccggggagcgaagacccgacaaacgacgacaacaccaataataaaaatccaacaagtggcgatcagccgacagatggaaatgatgggtcaacagatgacagtacacaaatgaaccctgaaataaataatgaagcagacaatcaaggtcaacaaaattcttccgagaaaactaatgatttaaatggcaaaacagagacgacagcacaatcaaaagccgcccttcgtataattcagctcgctgatgaaaacgatgggtcacaggttgacgattctaaaaacgaatcagatatttcgatagcaaaaaaacgtctgaatgctgcagctgaacaaatacagaaaatagaggaagaacttaaagaaaagcaagaggagcataatagtaaggttgagaagcgcattgagaaactggataaagaaataaaagatctaaatgataaggttgactcattaaacatcaaaattaatgacttaacatcaaaatttaatgatatcaatgatcagtttaataaatcttctttattaattagtgaaaaggaaaaagagattttaaaaattttacggaataacggtgaaaaagatcgcttagaacaattatcttcagtttttactaatacagtagatacaaaaaatgtttcagacttaatgaagtactacaattatctatatttgtatgaaaagactttgactggttctctagatgtagggtctatgtcgctcttaagtagagacgctatccagggccagcagggcaacgtcaaatcagtcctggctctcacacctgaagaatcagcaagctgggaagctctcaaaaacaacacgatgcaaacagatgaggatattaacagcttcatcgacggaatgaccaagtttgcggacgactacagcggctttatccgtgactctcaagcaggtgttctcgacgaactgacgaaaatctctgaaagtgccgtaaaagcgtcagaacagcttgtaacgggcgcaacacaggaatctgcgacgttcagcaacgatgggctgtctggcaccatggcactgagtgtccaagatacggtcggccaggaagtgctgcaaatgtcagacatgatgggttcattgtctgatcgccagtcaggcatcattgattacacaaccaacatgcagcaaagcgtcaatgatgttcaagcgaaagccgacaccttaaacaacaactgggggaaaaatgtagcctccacgaaactcgtgcgaaatgacgtatacggcatactcggaaatacattagtagacgggcaaaacaatggctatgtatatgattacttagcgaatccgcttaaaatcagcggagaggttccggaagaaaaaattcagacggtacctccggttgtcatccttgtcattgtgttgatcagcagtctgttaatcggctatttcagctcgtattaccaaaacgcaccgcttctcgtcaaaggagcgttattcggaattctgaatatccttgtcggacttatgatcagcttgttcggcttgaatatttattcattgccggacgatcagacgattaagtggtcggtgtttacgattctattgctggtcgcaagctctgccttcatccggacggcattcagattcggatcaatccctggctgggttgcttcagcagcaatgatcctattctatgtcgcaccgcttattgatttgatcatgccgaactttacatttgaagatccggtttcgaaagtatatatcgacatccagtacggtactgggcacttgtttacaatgggaataacagttctgctgatcattacggtgattgccgtggctctgccgctgattatccggttgatggctgaacacacagcagaaagcgatgaaacgtatgaagcgtgatcgcagcatggaaaaggggatcatgatttgtatgctctccttttcccttttcataccctctgcagcggctgcccaaactgaagaaaatacagatgtcgcgccaaaccagtatgagaaaaaagacatcgaaatcgatacgaattatttgcatgaagatacctactatgaagaaaaaacagaactgcctgaggaacaaaaggatatcacttttgataaaccgaaggacaaggacgccgagctgataaaagatttgtttacatcaacaaatgccgaggattccaacacgattgcggcccagtcgaaacagcttggaattacttttgctgaaaaaccaatgacaaagacatcatcaacggaaacagaagatgaacaagaaacatcatcattgctgctgccgatgatctatgtcgtactgatcctgctcggaattgcaggcatcgtgttcctcatcccaaaagtcacagcgcaggaaaacaagaaggcgtaggccgcgtgcttgtgttgtgtaaaagaggtgccgtacaataataacggaaaaggaggtttccaatggaactttatatcatcaccggagcgtcaaaagggctgggtcaagccattgcattacaggctttagaaaaggggcatgaagtccatgccttatccagaacgaaaacagatgtctctcacaaaaaactaacgcagcatcaaatagacctcatcaatctcgaagaagctgaacagcaatttgaaacattgctctcatccatcgattcagatcgttattctggtattacccttattaataacgccggaatggtaacgccgatcaaacgtgccggcgaagcgtctcttgacgagcttcagcgccattatcagctgaacctgactgcgcccgtgcttttgagtcagctgtttacaaaacggtttgcttcatacagcggcaaaaagacggttgtcaacattacttcaggagccgccaaaaatccatataagggatggagcgcgtattgcagttcaaaagccgggctcgacatgtttacgaggacattcggatttgaacaggaggatgaagagctgccggtgaacatgatttcgttctcacctggagtgatggacactgagatgcaggccgtcatccgttcttcatcgaaaaaggatttccaccacattgaacgattccggaaattaaatgaaacaggaagccttcgcagtccggactttattgccggcacgctgctttctttactagaaaaagggacggaaaacggccgcatttatgatattaaagagtttttgtagagcagatattttctgctcttttttttatacaaaaggctgcagccagcgcattttattgaacagccgcatatactgactgaaacgttgcttttagggtataacaatgatgataagaagatcaaaatgatgtgacataagaattgagtttctctgcaaattatgttaggattctaaaaatatctaaaggaggggtttccatgagaaaggttacattaatggatgttttcacccatccaattgcacaaaaatatcttcagcgttccggcgtggcacatgcgattgcctgcgcttatcatgcatacaggctgtctgtgaaggctgacattaatcctgatttagcagcaaaagcggcactgcttcatgacattggccattatgaatggtatacagacggaaagtgggattatgagaaatacaaaagaaatgacattcatgccattaaaggggcggaacgggcgcataaacttctgattcggcttggcgaggaaccgaaagcagcaaaagagattgcactagccattttgcttcatacagattcctatttgcctgaaggcgaattagataaaaacacactgcagcagattgtcaaaaaagcggacgaactggatgaagagccgggcggccaccatcattaccgccaaattgatccttcaaccgcacgaaaaaaaatagaaaagctggaccaattaatcgaccaagcccaggcatccgtgataaagcctgtataagtacggaacagcgccagctttcttcgctgtctccgcttcatcgatacttcctttacacccgcctccaaacgtattctcctaaaatctccgcacccctttgttttatcaggtaagcctgtgtcattatccataagcgcggcataagctgagataaaacacacaaaggggataaaagtatggtcaaccaaggtagtccgcaactggtctctttagtcgatccttatgtctatcagaccattaaaaagctcatcggctcaaggttcgttatacagacagtacagatacggtcagaggcagactgatcgatgtaaaacctgaccatatcacaattgaaggagcccgaaattctgtttgtttgatcagaatccagcacatgatttccgtcaccccagattacagtgagcgggtctaacagtgcttgcgcatgaaaaataggcgtacaacaggacgtcctatttttcagttaagcgctgtaaaaacgcactatgatacattgttccatcaaggtcaaagccggcaaattcctgatagtcaccatctgaaaaacagaaagtgacacggtacaccgtatagcaggaacggactgaagcatgctggcagacccgaaaatgataaccgtctgaatcttttacatacagccgggatttcccggcaaatggggcacagaggtgtgctgcctcaccaaaacattcgaatccggcgattttgccatcttggctgatatccagcaggagacaatcattgactctgagctcctcagtccgtacattcctgttctttttcggaggaagaacatagatataagccagttctgaatctgtatcgtatgtcacggccttcatcaccaacactcctttcattatattaagagttctgatatgagttcatttttgttacaatgatggggtataagttcttttatctgacagacaaagaaaaactaggaggaacaaagcttgttgaaatcaaaagtccatttttggacattgcagattttatttgttttgctgattatttttgtagcaacaaaagtttcatttgtatttcagccgtttattgtttttatctcgacattgtttttcccgatgctaattgcgggaattttgtatttcatatttaatccggtcgtccgcctgcttgagaaaaaaattccgcggacattatccattctattgatctatttactgtttatcggtttgcttgcctttatttcagcgtcagtcggacctatcatcaccgcacaggtgacagggctgtttaacaaccttcctgattatataaaacagattcaggcgctgacaaaggatttgtcccattctcaatggtttacctggatgatgaaccaggattatgtatcgatatcaaaaattgaacagtcattgacaagttttctccaaaacctgccgcaaaatatcacgtccagtttatctgcggtgtttggtgtcgtgacaaacatcacgcttgttattattactgttccatttatccttttttacatgctgaaagacggacaccgctttccgcatttggcagtaaaaattctaccggcttcttatcggacagaaggcttaaagatttttaaagatttatccgatacgcttgcggcatatttccaggggcagctgttaatctgtctttttgtcggaacagcgtgttttatcggctatttaattgccggactgccgtatgccctgattcttgggattgtcatggcgattaccaatatcattccctatgtcgggccttttctcggtgccgcgccggctgtcattgtcggttttatggactcgccggccaaagcgctgtttgcgattattgtggtcgtcatcgttcagcagctggacggaaacctgctgtctcctcttgtgatcggaaagcggctgaatacccatccgcttacgattattttgctattaatcggagcgggaagcttcggcggaattctcggcatgattttagcggtgccggtttatgcggtagtgaaggcgttcttcctgaatattgtccgcttgatcaagctgcgccagcggtcacgactcgaggaaaacgcaaagccagctgaataggcgggcaccattatcggctccttgcatatgatgctgtaaatcaatgcggaggtggggaaatgcctgcaattgtggggccgatttatatcatgtcagttacggataatgccgcggcaagctttggagacgtatttgcgatttcgcccaaaagcgtcgctcattcaggggcggggtcaggcacatttcagcttggtgattttgtgaagattaacaaccaaacgagtaaaactctcttcaaagatgccgatatcactgatgaaacagtttcgtttaacgggtaacagccttttcacaagaggctgttgcttttttattgtataatatgggtagtctttgaatagagaggtcatgttatgaaaatcagaaaagcaaatatcaatacgcaaaccggaatgatcacggacgtgtatctgcatgaaaacagaaaagaactgcgcacgcttgtagcggtaccgcagctggagtggagcacgatcatttcctatgaagaagataaagcaactctgcctgaacggctggaagcgtcgttgcgccggcatacagaggaaatccctgctggtgagctggccaaaaaaatcattcattgggtaacagaaatgtaaacggcgcttgaaagtttagctcctgcctgatcaggtgataatgaagacaaacaagacgggaggacaggcttttgagtgaagataaaatggatctctatttgcagcaaggaatgtatgggcctttggagacaaagcctgacgagcgccacttgtttttaggttctctaagagaaagagtcgttttggcactgacgaaaggacaggtgcttagaagcaaaccgtataaagaggcggagcacgagctgaaaaacagccataacgtcacccttttgattaatggagagcttcagtatcagtcttactctccttatatccaaatggcgaaccggtacggagtgcccttcaagattgtatctgatcttcagtttcatacgcctttaggcatcgtcattgcggctgacatcgctgtgaatcgtgaattgatatatattcaggacgacatttataatcggtcagtgctgaaatcttaagagacaaacggaccgtttgtctttttgttcatggcaattcacttacaactggagataagatataatgttctcatactgatggcggggaggccggctatgaaaaaagcacttatttgtattgattatacgaatgattttgtggcgagtgacggaaaattgacctgcggggagcccggcagaatgattgaagaggcgatcgtcaatttaactgaagaattcatcacaaacggtgattacgtcgtattagcagtagattctcatgatgaaggggatcaatatcaccctgaaacccgtctttttcctccgcataatataaaaggcacggaaggaaaagatctgtacggaaagcttttgtctctatatcagaaacatgaacatgagcctaatgtttactacatggaaaaaacgagatattctgcttttgcgggaactgatttagagctcaaactcagagagcggcagattggcgaactgcaccttgccggtgtctgcacagatatttgtgtgttgcatacagctgttgacgcatataacaaaggttttcggattgttgtgcataaacaagctgttgccagctttaatcaggaggggcacgtatgggctctttcccattttgcaaacagcatcggagcgcaagtggcagagtaaggaaggggaaaaacagtgttagagtacggatttaaagatgacagcctgtcattacatacagacctttatcagatcaatatggcggaaacgtactggagagacggcattcatgaaaagaaagcgatttttgagctgtttttcagaaggcttccgtttgaaaatggctatgccgtatttgcgggcttggaaaaagccattgaatacttggaaaatttcaagtttacggatagcgatttgagttatttacaggatgaactcgggtatcatgaagattttattgaatatttgcgcggcttatcttttacaggttcactttactccatgaaagaaggagagctcgtttttaacaatgagccgattatgagggtggaggcacccctggtagaagcgcagctgattgaaacagctttgctcaacattgtgaactatcaaacattaatcgcaacaaaggctgcccggattaaaggcgtcattggtgatgaagttgcgcttgaattcggaacaagacgggcacacgaaatggatgcggccatgtggggagcgagagcagccttaatcggcggctttagcgcgacaagcaatgtaagagccggaaagcgctttaatatcccggtttccggcacacatgcgcatgcgcttgtgcaggcttaccgcgatgaatatacagccttcaaaaaatacgcggaaacacataaggattgcgttttcttagttgacacgtatgacacgcttcgttcaggcatgccgaacgcgattagggttgccaaggaattcggcgaccgcattaatttcattggcatccgtctggacagcggcgatttggcgtacctgtcaaaaaaagcccggaaaatgcttgatgaagcaggatttacagatgcgaaggtgattgcttcaagcgatttggatgagcacaccattatgaatttaaaggctcagggagcgcgcattgatgtctggggtgtcggtacgaagctgatcactgcctatgaccagccggctctcggcgcagtttataaactcgttgccattgaagaagatgggaaaatggttgacacgatcaaaatttcgtccaatcctgaaaaagtgacgacaccgggcagaaagaaagtctaccgcattattaatcagtccaaccatcattctgaaggcgactatattgcgctttatgatgagcaggtgaatgatcagaagcggctcagaatgttccacccggttcatacattcatcagcaaatttgtcacgaatttttatgcgaaggatcttcatgagctgatttttgagaagggtattctttgctaccaaaaccctaagatttcagacatacagcagtatgtgcaggataacctcagcctgctttgggaggaatataagagaatcagcaagccggaggaatacccggttgatttaagcgaggactgctggagcaataaaatgcagcggatccacgaagtgaaaagcagaattgaagaagagcttgaggaagaataaagaaaaactggcctttcgttcgcgaggggccagttttctttatgtatatattatttttcatgtttagacaattttcgtcaaattatttgatatacttaggggtgaaagccgcgcgtattgtaagggggataaatcaatgagggtgtttgttgcaagacagcctatttttaatagaaaagaacaggttgttgcttatgaactgctgtatagagaaagcgaagagaacgtgtatagcgctaaagacggcgatcaggcaacaacagatttggtgatcaacagctttttaaacatcggaattgagaagctgacggaagggaaacgctgttttgttaattttacggaaagcctgatgttttcgaatcttcccacctccttcaatccgaaacagcttgtcattgaaatccttgaagatataccgatcacgccggccctcatttctagatgcaaagaattgaaaaaaatggggtatatgctggcgcttgatgatttttatgcaataaacccgcaagatgaggacttactggaaaaactcatgagctatattgatatattgaaaattgattttctcaaaacaacacgaatggaacgcagaacaattttgcaaacctacggctgccgcggcctgatttttttagcggaaaaagtagagacccgaaaagaatataaacaggcggtccaagacggctttcaattattccaaggctactttttcagcgagccgcgcatcatcagcgggcatgacctatcgactcatttctattcttactatgaactgcttaacgaactgagcaaagagcagcctaacataaagcgtgtgacagagtacatagagcgggatttatcactgtcctatcaaattttaaaatttttaaactcatcccatagccgtttgagccagaaaattgaaagcattcaacaggccattatgttgctgggatttaatgaaatcaaacggtggatatatatcctttcctttaaggatttaagcaggaaaggccattccagcaagcacgaaatcattaagatttctttgataagagcaaagctttgcgaactgctggcgagaaagacatcccggccgcagcctgcttcttatatgctgatcggaatgttttctctcatagacaccctcctgcatagagaaatagaggaaattgttcaagaattgcctttaaaagatgaagtcgggcaagcattattaggccatcaaaacgactactaccaaatgcttgagcttgtgaaattaattgaaagcaacaactgggacacttgctcggaattaggcaatcaactcgacaaagaagaagcgtatgaatgttatttagaggctctggaatggtgtcataatcttatggacgcaaaatgattgcggtcctctgaccaccgcaaagcaagaatcattcggctttgcgttccgataaggctgatatagatgccgtcgggattaaagaccgtatccacttcatgccggacgcccatttgtttgatcaggcgcttaatggtttgtttatcggactgctcggctgcggtcagaatgcggcgcgagagctcccgcgagcccgcaatgcggccgagaacgagctgggcatccgcaaatatccctgcggcctgcttcgctgaacggataaaggtatcaatattgttggcaggagcgggcggacggcgtacctcatacggatacacgtaaaaccagggataacgatatctcatgggagcacctcacaaaaaagggatgtttctatatgtatagatccctaattgccgaatatgacaaagcgaaaaggccacaactttagcgttgcggtctttttcggtgtttgtcggtcaggaaacgccaagaatcgcatattcaattttgaaaatacggtatgaaggactatagtcttgcttagtaaaaatgcgaaacccgttaaaatcaaggagattaagaatctttctcaatctgagcagaaatatacgctcctgcacatagaaaaatagtcccgttcttgttgtgattcctttgagtataaggacctattgatatttgcggtgtcacgcaggacttttttgcatacttttcggtgaaaaataagccgaaagcagatacactattagtaacagatcaaatacctaggactcgttcaccatacacaattcattgatctttcaaaaaaaggagtgtggaaacgatggaaaagaaacttgaagaagtaaaacaattgttattccgactcgaacttgatattaaagaaacgacagattcattacgaaacattaacaaaagcattgatcaactcgataaatacaattatgcaatgaaaatttcgtgaaaaagacttggaaacaagtcttttttttcgttctaccgatacaataaatggataaagtattatatgattgttaaaaaacgaaaaacctgctgtcctttaaatgtcccatttagtaaaatggaatgggaggggggaagtcgttattgagcagatatgtttagattctgtccggatcaaggagaaaatgaaggagattgtaagccaaaaaataatgaatcaggacttggaacgatatcttcagaattttattgagtctaaggatacgtttgagtttgccgatttggctcttcatcattatttagcttttaacggtcaggaccaaaaagcaatcgaattgctagctgccggaattgaattgcttatactctcattcgatatttatgatgacttagaggatcaagataatggaagtgctgtctggatgaagattgactcgtcaatcgctttaaatgcagttacagctctttacaccctaagtatacaagtgatgtgtcaagctagtcatgaaccagaattttcacaagagatattgaattttgcgttacaatcaattcaaggccagcatgatgatattgtgaatgtgccgcaaacggaagaagcctgtcttgaaatgatcaaaaataaatcaggagcgctaacggcattgccctgtgtaatgggagtaatgctggcaacaggcaaataccatcccattgtagcttcatattcttatgaacttgggattatttcacagatcgataatgattataaaggtttgttttacttaaataacgattttgttcagaaaaaaaatacattggcatacttatacttaaagaaacaatttaacgatgcttcagcggagctactaagtttatatcaaaaaccagaggaatttgtttctattaatactaaggctttgaagcgaaaattgacagaagcaggcgttatacaatatttactggtgatgaaacatttatctctccaaaaaataaagaatgaaatgtcacaattaaaactagaagaagataaaactgaaaaattattgtctgttatgattaaataaggaggggatttattatgcaagaaatggtaggatacttaattaaatacccaaatgttttaagggaagtaatggaagggaatgcttgtttattgggtgttgataaagatcaatctgaatgtatcataaatggttttaaagggttagaaatttattcaatgatggattggcactattgagggttaaatgaagtctagaaccaataaaatttctgtattgttagttgtaataagtctgttatatgttatttatttgacctatataagcaataataatttgttagttggagcaactgtttcgaaagggaagaacggagacgttgtaattaccaatgtagatgaatattcaatggcatcatacagtggaatagaaaaaggggatatcgtaaagcgtattaataatcaaaagataaacactaaagaaataaaaatgaataagcttaaaaatgtgagctcaatggttgttgagagaaatggcaaggatgttgagctaaagctgactttatttaatgataaaaatttttctacttacttaataccgttaatgttttatattgtttgtttattttgttgcctatttataataaaaataaatgaatcaaaggatttaccatctgctttagttttaattatatttctgttatccgcttctattgcttatataagtgcaggagtttctgttaaaggcgatatactatgcagatgtattatggtggtaacattaatatctgtaccgctaaactaccttctctttctttatcattattttagagagttaggcactaccttatttgataaaaaagttttcattttatatttggtaccgatcataaatgtagtgtgtgaaatgttccgttcacaccttttctttcgtgattatgtgcctaaattaagtttactatcctttttctttttatttatcatagtagggatatatttctgtatcattttaattaaaaataaagatactgaacaagcgcatattattaaggttctcactattattaatatcttttctttctcaccttttttgtgtttatatttgataccgtatgtctttttaaatgcgcactatgtttcatcctttttagcagcttcatttatgatgctaatacctttctccttagtatttcaattcatgacaaataaaatctataatgtagattttattttaagcagattaaggtactatggctttttagctctaacgccaacaattattctaatctctacaattgaattgattagtagtcctgatagtgatttttatagtgttaaactaacctttttaatttatattatcatgttggcggtcttttattataaagaagtacttgatttcagatttagattaaaaagggtctcggaaaaattcaattatcaagacagtatatataaattcacgcagatgataagagactctacttccctgtctcaagtatttgaagaactgaaaaatactatacttgaggtttctcttgttagccgagcacatgtatatgaagtttcagctgacggaaatattaaactatatgatgctgagaacgtaaattcatttgaaaaagtctatgaaaaagaatttagaaaagtaacatccgagatagggaaaatcgttgaatttaataaaggttttgtcatgaagataggtgaacgcggtggtaaatcatttgtgatcctttgtttatctaaaatgaatacgcctcgtctcacactcgaagaactttcttggctgaaaactttggctttttatacaaacgtatcgatcgaaaacgtcatgaaaatcgaagaactaatgagtcatttagaagaaataaaacaacaagaatccaaccccgtatggctcaaaaaactcatgtatacgatcgaggaaaaacaacgctcggatctcgcccgcgatctccacgattcggttcttcaggatttgatttccttaaaacgccagtgtgagctgtttttgggtgattttaagaagggtgataatccgtgccgtgaagaggtgcaggacaagcttgtacagatgaatgagcagatgtctgatgtgatttcgatgacgagggagacgtgtcatgagctgcggccgcagcttctgtatgatcttgggctggtcaaggcgctgtcgaagctggtggcgcagcagcaggagcgggttccgtttcatatccgtttaaataccgggagatttacggcttcccttgatctggattcgcagctgaatttgtaccggatcattcaagagtttctgtctaatgcggtcaagcactctcaggcgacggatgtgctgattatgctcatcagtattcaaaacaaaatcgttcttcattatgaggatgatggcgtagggtttgatcaggaaaagaatactgagcattccatgagcatggggctttctggcattaaggagagagtcagggctttagatgggcgccttcggattgaaacaagtgaaggaaagggctttaaggctgatattgaaatcgaattgtaatggatttataacggaaacgacttggcacaggccaagtcttttttataaaatggaaaagagtgagtaaaagggaggaaaacatgaaaaagatactagtgattgatgaccatccggctgtcatggaaggcaccaagacaattttggaaacggattcgaatttgtctgttgattgtctcagtcctgaaccgagcgaacagtttatcaagcagcatgatttctcgtcatatgatctcattttaatggatctgaatttaggcggcgaggtcaatgggatggagctttctaaacagattttacaagagaatcctcattgtaaaattatcgtgtataccggttatgaggtcgaggattatttcgaggaagcgattcgtgcgggtctgcacggtgccatcagcaaaacggaatctaaagaaaagatcacccaatacatataccacgtactcaacggagaaattttagtcgattttgcttactttaaacagctgatgactcagcaaaaaacaaagccggctccttcctctcaaaaagaacaagatgtgctcacacctagagaatgcctgattcttcaagaagttgaaaagggatttacaaaccaagaaatcgcagatgcccttcatttaagcaagcggtccattgaatacagcttgacatcgattttcaataagctgaatgtcggttcacggacggaagcggttttgattgcgaaatcagacggtgtactttaaatgttgggggtgtagatgatggatacgaaacacacattgcttgaagcgcttggtatagagattgttgaaaacacagcggaacgatgcgttgcggtcatgccggtggatcatcggacggttcagccgttcggatatttgcatgggggcgcttcagtggccctggcggaaacagcggcgagcgcaggtgcacagaacctgattgatcattcaacacaggcttgtgtcggtttggagattaacgccaaccatttaaaatctgtaaaggaaggaacggtaaaggcggtagccgagcccgttcatatcggcagaacgacgattgtctatcacattcacatatatgacgagcaagagaggctgatctgtatatccagatgcacgctggctgtcatcaagaaataaaaaaacagccggaactctgcctgtccggctgctattatttttatagataagaatcctcttttcgtttaatcacaaagtttctgattccgttatagtcatcctgtacgcttctctcatcaagcttgacgccggagttatacgcagcacggcagatcaagtgcccgccgataggcgacgtaataaagataaagagaatcccaagcaggattttagcggagagctcccccgtcacaaaccacaaatagaagaagacaccgagcagaatcatattgacacctaatgttgagcctttagaagcagcatgagcgcgtgtaaacacatcgggaaggcgaagtacgccaaatgaagcaatgaggcatattagagcacccagcaaaatgaatacagccacaacgaccttagcggtttcgatcattttcgataatctctcctttctccaggaacttggaaaatgcgatcgttccgataaacgataaaatccccagcaacaaaataatatccaaaaacgcacttgttttcagcaaaatggagacaagcgccgtgattgcgatcagattgatgccgattgcatccagagccacgacccggtcaggcacagtcggccctttaatgacacgaatgacatacaaaaaggtagacactgccataatgccgagcgcgatttgcaggatcagcgtaaacatcaccggctcacctcctgtatggctttttcaaatgactcccgaatatcaaaaatcgctttttccgcatcctcgatatccattgcatgaatataaagtattgttctgtcatctgaaatatccatcaccaaggttcccggcgttaatgtaatgagcagagaaagcagggtgatttcccagtccttcgtcagttcagttttaaaagcaaaaatacccggtctgatattcagttttggagataagactgatttcatcacactgacattggcaaggtacagttcctttataaaaatgaaacagagcttgatgatagaaatcaatttccatagataaaactggcgagtgaaaaagcgccggaagaaaaagagagagagcattcccagaatatagcctgtaatgaatcctgcggcgcttggactgttgctcaagaacatccagcaaaaagcgagaaacacatttaataaaatttgaaatgccatgcgatctactccttcagaacagcttcgatatatttttccggattcagcagcgtctcggccgcttgatcaacgtaaggcgacacccattctgtacccaacccgaagagaagagacagcaagagaaaaatagctgccggataaagaagtcctttagctgttcgatgatttggttttggcgtttctttttcttcgccccaaaacgcatgtataaagaccctcagcacagagtacagtacgagcagactcgaaagcagaatcagcatggatatcgtaaattcaccttctgcgaagccgccctccgcaattttaaatttgccgacaaatccgctcagtggcggaatgcctgcaagagaaatagcggaaatgaaaaacatccatccaagaacaggatagcgtttgatcagcccgcccattttatgcaggctcgcggttccagtcaatgcgatcagcgtacccgccagcataaacaaagcgcccttaatcagcatatcgtgaattagatagtagatcgcgccctgaatggatgcgggggtgtgtactgccacaccgaacaaaatcacgccgacagcggtaataatgttatagatcacaattttcatgacattcgaataagcgagtgaaccgatcacaccgaaaatcacagtcagcgccgccagccaaatcatcagctgatgggtaaaggcagtatcgtgaataaaaatcaatgtgaaaaccctcgtaatcgcatataacccgacttttgtcagcaaagcgccgaacaacgcggagattgccgccggtggcgcgtaataagagcctggaagccaaaagtagagggggaagattccgcccttcatgccaaataccaaaagcagcaggacaccaatcacagtgatcagcccggtttgtcctgattcgctgattttcacgctaagatccgccatgtttaacgtaccggttacagcgtataaaaagccgacccctatgacaaacagggcagacgatacaatattaaacacaatatatttaagggattcccgcagctgaatttttgtgccgcctaatacaatcagcatataggaagcaataagcagaagctcaaaaaatacgtacatattaaataaatcgcctgttaaaaacgctccgctgacgccggcaagcaagaactgaacgccggagtagtaaaaggagcgctcccgtttttcaccgacagaacggaaggaataaagcccaaccaataaaccgatgaccgctgttgtgagaacgagaaggctggcgaattggtctgcggcaagcacaatgccgtacggcgctttccatccgcctaggctgagtgtctggataccttttgtgaagacagtctgtacaagtatgccgctaatcacaatcccgatggccgatgccgccgtgctgaagattctcatgagcataagattcttcgtcatgaaaatcagaagaatagccgacaaaagcgggatcaggattggcaaaataacaaaattattcatgttgatcatttcccctcatttgatccatatcgtccgatttcaattcctgataagcgcgaaaggccatgacgagtatgaatgacgtaacgccaaaagaaatgacaattgcggtcaaaatcagggcttgcggaagcggatcgacaaatgatttggcatgctcgctcaaaatcggagcagcgcctttctttaatcctcccatagttaaaagcattaaatgaacgccatggcttaacagtgctgttccgataatgacgcgaagcaggcttttagacagcagcaaatacgtggcagccataaaaataataccggctaatacagccattaagatttccattattcttcctctccaatcgtttgaataatggtcatcgttatgcctacgacaacaagataaacgcctaaatcaaatatcgtcgctgtggcgagctccgttttcccaaggatcggcagctgaaagtatccgaatgtgtgggttaaaaaaggaaacccaaagacaaaggagccaacgcctgttaatacagcgagcagaaggccggctcccgcgacataaatgaaattgacaggcaaaagggaacgcacggtttttaaatcatatgccagaagcaagagaacgatggaagaggacgtgatcagtccgccgacaaagcctcctccgggcgcgttatgccctgataaaaataaatagaaagagaaaagcaaaatgataaaggatacaagctttgtcgcggtttgaagaatcaagtcatttgttttttgttcattcaccgcttttcccctcctcttttacttttgttttaatcatgctgtaaatgccgagagcggctattgttaataccgtaatttcaaacattgtatcaaatcccctgaaatcaacaagaatgacattgacgacattatcccctccgccgagatcgtggctatgtttgacaaagaaggacgcaatgctgtcttttgtccgctggcttgaggatgcgataccgagcagagtaacgataacaccgacgcctaaagaaatgataaaattcgtcatccggaacgttctcgtttttgttttcagcctcagtttcggcaaatggtagaagcaaagcagaaacagtgccacagaaatcgtttcaatgacgagctgagtcaatgccaagtccggcgctctgaaaatgacaaaaaacaatgcaagcgtataaccgacaacaccgagtgcaatgatcgccgtcagtcttgacctagcaaaaacagtcgccactgtggcgctgatcatgacaagcgtcaaaatgatttcgtatacaccgattttagccatgccttccgttttaaatgaaaatccgcctttaatggcaaaagctccgcctatcagaatgatgaaaccagcgaagatatacagcaaataatctcttaaaaacccggtcatatattgttttgtgacccggtaagagcctttctccatcagagtcaaaagcttatcgtataaccggttgagtgtgagtttcgaaggaaacagtttatagattcctttccacttattcagcgacaaataaccaattgttccgatcacaacaatacccgcagtcatgagcaattccgttgtaaccccatgccactgtgaaatgtgaacgtggaatttctcatggccggcaagcagtgtcggatagattgagttcatcgcaggctctatcaggctgtacgacaatatattcgggaaaaagaagagactgacagccaaagcgacaagaatgaccggtggtacgagcatgccgacaggcgcttcgtgagcctgtttttcaagctgttcaggctggtaatttcctctgaatgttttaaacagcaatttcatgctgtagataaacgtaaatacacttccgatccaggcgaaaagagggaacagaacgccccatgtctgcacgttgaacaggtcaaaatgtgtcacgcgaagcatgcttgtgaaaaacatttctttactcaaaaatccgttaaacggcggtaagccggccattgaaaatgtcccgattaaggaaatggtaaatgtaatcggcataatcgccatcaggccgcctagcttccggatatcccgtgtgcctgtttcgtgatcgataatcccgactgccataaacaagcttcctttaaaggttgcgtggttgattaaatggaaaatggcagccatagcggcaactgtataatattctgtatggccgtaatgaagggccgcagcactgactccgagcatggagatgatcatgccgagctggctgacggttgaaaacgccaaaatcgattttaaatcagtttgtttcacggcatggaatgaaccccaaaccatcgtaaagaggccaacgagggacacgatccaaaaccactgagctgaaaaggcgaaaataggactgaatctcgcaatcacataaatgccggcttttaccatagtagctgaatggagataagcgctgacaggcgtcggagcttccatcgcgtcagggagccagatgtaaaaaggaaattgcgctgatttcgtaaaagcccctaataaaatgagaatcatagccgggataaacaattcgtggccggcaattaattgaacctgatgaaccatctctcgaatactgaaggaatccgttatcaaataaaggagaataaatccgccgagcatgcacagcccgccgctgaccgtaatcaaaagtgatttggctgcgccatagcgcgacttttcccgcttataccaatagccgatcagcaaaaaggatgaaaggcttgtaagctcccagaacatgtagagaaccatgacattgtctactagaacgacaccgagcatggcgcccatgaacatcaataagtagacataaaagggcccaagctgttctttttctttcgataaataaaaaatgctgtaaagagtgaccaaagagccaatgcctgtgatcagtaaagcgaataataacccgaggccgtctatataaacggtaaagttaatgccgagtgacggaatccactctaataccgatcgaagtgtttctccagactgtgtcatcctgatcattgggagaaagtatataaacagcaagacgggcaggatcaacacaaaccagcccgtatgcactctttttgcgtattttgccaagaagggaatgataaaagcaaataaaaaaggcgataaaatagcaagatgtaagagctgcaaagataagacctccttttctcgttctcaattgaaaaatgcgctatgtatgaaatatacggtcaaacgacctagtccaaattatatcgcacttttctgcaagctgccacgcttcgaactgctgtaatgggtttttatgagttcttttgacctcaaaataagtctaacaaaaaagaggttatttgtatatttaaaatcaatcctgatcaagctgaaggaaaggagctggtcatgtgaaaagaaaagtcgtgatgtgctcaggtttattctgctcagtatttgcaggggcattcatgttgaatcaatatgacgggcgcagcggtgtggcggctagtgatgagtgggagctgtatttactggagcaccatctgtcagccagaatgagtgagatggaatcaaaggatctgccgtttggtccccgagagtatattcggattgtgaataaataaaaaaagagttccgcataaaacggaactctttctgtttatgaagtgaaaaaacgaagcagcactgtcgcgcaaataactgtgcctgcaccgccgagacgggttgaaatttgggcaaacggcataaggcccattcttcctgatgccgataaaatggcaacatcacccgttccgccgaggccgctgtggcagcaggtaacgattgcggattcaaccggatacatgttcatcagcttgcctacgaaatatccagaaccaatcatcgcgataacaactgaaatacagatgatgacaaacggtatagaaatcacagacgctacgtcatccaacggaataaagaggatgccgagaccgaccatcagcggccatgtaaagcttgaagaaataaacttataaagctggtaagcgccttcttccatttttttcggaagaatatttgcatacttgacagccgcagctgaaataatcattaagatcgcgcccgggatgaagatgaatttctccaataacccgccaaaaataaagaatgtacacgcgagcagaactcctgctcccattaatttgaaatcaatttttgcttcggcttctttttgattgaaaatctcatttgcttttttagattttacgagacgtccgttcccgtttagatctggacgcttatcgccaagctttttcattaaggctgcacatatgatagcaaaaacatttcctataattgctgctggaaccagctgagacacaaatacatcagcagatgagcccagtatttgtgagtaggcgattgaaagcggcaaaattccttcgcctattcccccggcaataatcgggacaacaacaaagaaaaaggaatcataggcactatagccaaaaataaatccgacaaggatgccggctgcaacggccgcgatcgttcctgcaaccagtggaacgaacattctgataaacccctgtattaaaacaattctgttcataccgaggatacttcccacaacaaggcaagcgatatagaaataaaggaagttagacgttttcatcaagttggttacagcgtctaaagatgttgaattcagtacattgtaaaagactaaaaatgaaggaacaaacaaagataaaatagcagggccgccaatatccttcaatatcggtatgcgttggcctatgtctccgagaaacacaccaagaatcataatgatggcaaacccgccaagcatatttgccggcagctcattgtaataggctgcaagaataataataacagctaatactgtgtataatggcaaaggaatcacaccgatttcccaagaccaaattttttgaaacaggtttttctcctgtgagtctttttgctcaggtgaaattgtccccgtttttggaattgctcccatgtcatacacccccatgtattgtttgttacagtctacaagaaagcgttaacacttcatatttttttaagttaaaaaactaataaacaattaaattaagagggtcttttgaattagaaaaaaacccctgagaatcgtcttcccaggggagaatgtttatctttttcctttaatataaggcacgccattggcttttggcgcatctgcccgcccgataaagccggttaaagcgagaatcgttaagacataaggagccatcagcatatacacatttggtatgtctttaaaaagagggagcagcgatccaatgatgcttaagctttgggcgaatccgaaaaacagggcggcccccagtgctccgatcggatgccattttccgaatacaagcgctgccagggcgataaagccttgcccggagatggtagagtgcgtgaaatcaagcgcaattgtggaggcatatacgccgccgccgagaccgccgaacaatccgctgatcatcacaccgatgtagcgcattttatatacgttgattcccatcgtatcggccgccatcggatgctctccgacagaacggatacgaaggccgaacggcgttttgaacaagataaaccaggaaataaaggcaagtgctattgcaagaatagacgtataatagacatccgaaaagaagatctttcccaagacgggaatatcgcccaaaccggggattttcgtcttataaaaaggctctggaattttgtctgtctgcgctttgccgtagatcagtttgacgataaataaagttgccccaagcgccagcatgttaatggcgacaccgctgactgtctggtcggcgcgaaacgaaatcgccgctgccgcgtgaatcagtgaaaacagggcgcctgctgccatggcggcaaggagcgaaagccaaggtgcggcggcacctaattccggaccaaaaaataaattaaataacacgctggtgaacgccccgataatcatgaggccttctaggccgatattcaccacacctgatctctcggaaaacacgccgccgagagcagttaaaataagcggggccgcatagacgagtgttgcagggacaatgatagataaaatctgcacaatgtccacttagttcgccccctttttcttcaatttgcccatgacgaaacgaatcgcatagcttgaagccacaaacagaataataatagcaatcacaatatcaacgacctctgatggaacgcctgattcaatcggcatatttaatgcgccgattttcagcccgccaagcaggcatgctgccagtataaccccgatggctgtgtttcccccgagaagagcgacagcgataccgtcaaagcctacgccggtaaatgcgcctttcactgctgcgtattcgaatgttcctagcccctccatggctccggcaaggcctgcaaaagcgccggagataagcatggaggtcatgatattcttccgcacgctcatgccggcatactgggaagcgtgctggttaaacccgaccgcccggagctcaaatccttttgtagttttgttgatgataaaccacatgataactgctgcgagaagggcaacgatgattcccaaatgcagccgtgagtaatcggtgatctgttcaagaaaaggagagcggagggaggcggattcgtgaattttccccgtcttgtcctgatgatctgtcaagacgtttgaaatgatgtaattggtcatgtgcagcgcgatataattcatcataatggtgacaatgacttcatgaacgtaaaatcgcgctttcaaaatgccgggaataaacccccataatcctcctgcagctgccgctgtaatcaatgcgagcggcaagtgaatatatgccggtccgtcaaacgccgtaccgacccaaaccgctgctgtccagccgacgagcagctgtccctcgacgccgatattaaagagtccggttcggaatgcaaaggcgacagccaatccggataaaatataaggcgtaatttgccggattgtttctccgacataatagatttctccgaatatcccattccacaaagccgaatatccgctggccacactgtagccgctcacaagcataatcaacgcgccggccgcaagaccaaggatgattgcgatgagcggcacgagtaaatgagagagtcgtttaaccatttgctttccccgcttccttttgcgtgcttcctgccatcaagagaccaagctcctgttcagtggtttcctgcggattaacgctggcgataatgcgtccttcaaaaataacggcgattctgtcactgagattcataatttcttcaagctcaaacgagaggagaagaacggctttcccggcatcacgctgctcaatgagctttttatggacaaattcaatcgctccgacatcaaggccgcgagtcggctgggcggcaattaataaatcaggatttcggtctatttcccgcccgataatcgctttttgctggtttccgcctgacaatgcccgagcgtgtgtatattcatccggcgttctgacgtcgtactcgctgatcaggctgcgtgcttttttgtacatttcgcctttatgtaaaacgcccaatgctgaatacggctttttgtaatagctttgcagcaggatattctctccgattggaaaatcaaggacgagaccgtgtttatggcgatcctgaggaatatgcccgatcccggattcagtgatttttcttggcgtcaggttttggatctgttttccgtttaaggtgattgttcctgaatctgttttgcggagtcctgtcaccgcttcgatcagctctgattgcccgtttccgtcgacgcctgctatgccgactatttctcccgctttgacagaaagagacaaatctctgactgtctctattccgcgggtatcctttacagttatgccgtcaatcgcaagcacttccgctcccggctgagcagctctcttttcagttttgaacgatacctcgcggccgaccattagactggcgagttcgtcttggtttgtatcacggacatcaagggttttgatgccttttcctttacggataaccgtaacgcggtcacaaatctccataatctctttcagcttatgggtgattaagatgatggacttcccttctttgaccaggttcttcataatttgcatcagttccttaatttcatgaggcgtcaaaacagccgtcggttcatcaaaaatcagaatgtcggcaccgcggtagagggtttttaatatttctgcgcgctgctgcataccgactgatatgtcagctgcttttgcttcaggatggatctgcaggccgtatcgatcggaaatgtcctgcacctcttggccagcacgcttccggtcaattctgccaaacttctttggctccttcccgagaataatattttcagcaactgtaaaggtgtcaacaagcatgaagtgctggtgcaccattccaattccaaggtcattcgctttgttcgggctgttgatgtgcaccttctcgccgcgcacccgaatttcaccccgctccggctgatacagcccgaaaaggacattcatcaatgttgatttccccgctccgttttcaccgagcaacgcgtgtatttcgccttttttgacttgaagattgatattgtcattggcgacgatacctggaaacgccttgcggatattgagcatttcaatgacatattccattgattgaccgctcctttatttcaaaataaaagaaaaacaagggataagggctcgacctccttatccctgctattcttattcagctttgaaggttttgagctctttctcagttgccgggacttccaatccgtcgatgatttttttcttccatttatcgaccgctttgatcacatcatccgatagattttgtttagatggagaaatgccgactccgtcttgatcaagcccgtaggtaagtgtttcgccgcccgggaactttccgtcactcgcttttttcgttacatcttcaacgactgtatctacttttttcaccatggaagtgagggtgacgttatcatctgttccttctacctggccttctgcgtattggtctttatcgacaccgatgacccagacatcgcgttttggatcttcttttttcaggtttttcgcttcagtaaagacgcctgtgccagtggcgcccgcagagtgataaataacatctacgcctgatttatacatgctttcggcggttgctttgccgacatcggctttatcgaaacctcctgcgtatttcacttctacaacggctttagggttaactgcttgcacgccggcacggaagccgacctcgaattttttgattaactctgattccatgccgcctacaaagccgatttttcctgatttgcttgatagggctgcggccactccgacgagaaatgagccttcctgctctttaaacgtaatacttgcgacgttgtctttatcgacaacagcatctataatcgcaaagtttgtatttttgcgctggtcagcaatttcgctgattgaatcctccattaagtagccgacgccgtaaattaagtcaaaattctcacgcgccaatttatttaagttcgttgtatagtctgcatctgatttggattgaagatagtcgtaaccgtttttgccttttttcagcccattctctttcccgaaggcttggatgccttcccaggctgattggttgaaggatttgtcatccactccgcctacgtcagtaaccatcgccacactgaatttgtttttgccttcgcctgagccgctgcttttttcgctgtttccgcatgctcctaatatggtgcctgctgcgatcacaagtgacatcgccaatccgatttttcgtttattcaagatataaccccccagaaaaatttggttcaaagctgatccggccagtcatgtgatgggctgtcctgaacaatttcttagaatcgataaaattttctgataataacaaatggaatgcgctgagacagttctattcttccctgaataagcgtggtgtgagtatttccttcgaaaggcggggaagagaaggatgcggaaggcgttccgggcggaaaaccgtgacatcgttttctgaagtaagacttatgacttagtttttcgggatcaacttaccaatcataatttatcatttaactaatatgaaataaatagaatttcgcataattttttaaaaagtatctatttttagaattgtttgcttaaaatgttgaaaggccctttgttattcttgtataacttaccaacaatagaatcaagcatcttggcaagagatatgacagaaaaacgcactgctcaaagcaagcagtgcgttttcttatagatattgctttattccgttaaggttactgttgttgacgttgtactgaaacacaggtcttccgatcgttccgtacgccatttctacattcagaacctgtatatcttcaagaaactttaagtattttcgtatggatacttgagagatttctgtgtgctttgccaagtcttctgtcgtaaaagattcattttcaaatgactggatactggaccagatcagcttcagcgtgctttttgtcaggcctttaggaagctgcactttttctgttgcttctttcttttgaaaaagctcggcgtccagttctttttggctcatgttgcgatgggttgaatacaccttttgttttcgtctgtaatcagacagagccgtttggaatcgttcaaattcaaacggtttgattaaataatcaacagctccgtaccgaagtgttttcttgattacgtcaagctcgctggccgctgagatgacaatcacgtcaaccgcttcattttgggctctcaattccgtcagcagttccagcccgttttttcccggcatataaatatcaagcaaaatgaggtcgatatgatgctcgcctaaaatatgcagagcgctttgaaaggaagaagcgatgcctttcagctgaaagccatctatttggcttaagtatcgtttatttaattcacccaccatggggtcatcttcaactattagtacattaatcatgattttcctccttcggttcgtacgggatgcgaatactgaatgtcgttccttcattcttttcgcttgtgaggatcatttggccttttaaattttcgatgctttgctgtgtgaaataaaggccgaatccccggtttttgccctttgttgaatagccttgttcaaatactttggcttggtcttcttcggacatgcctgctccagtatcggtaatttcaatatcaagtatgctgttatggaagcgcatggacatggtgatttgttttttcggcatatcggcaacggcgtctaagccattgttgatgagatttccgatgattgtaataagttcatggatgacagaagggtctgccgcgttcgggatgacaccgttgcattcaatatcaagatttgcgccctgctcacgtataaagctttgctttccgagcagaaaaccggccagtacggagcttttgacatcatttataatttcacttgtttctgatttttgctgtatggctatatctttaatataatctccaagatcatcatactctttcagctggacgagacctaatatcacatgcagtttgttcataaattcatgagactgcgctctcagtgcgtttgcatacattttaacaccggaaagctgttcagctaaatgttttacctcggtcttgtcgcggaatgttgcaatcgctccgacagtttgtcctttcagctggataggaacttcattaaacacaagctccagcccgttaatgcggacgtctctgtcttgaagaggtttttttgtctcaatgacctttttcaagcggcttttcggcaagatgtcatctacatcctgatcaatgggatttgtgttgatgcccattttgacgaataggcgttttgcttccgcgttggcaagtttaattttgccatgttcatcaacagcgagtattccttccttcgtcgattccagcatcgcgctccgttcttcaagcagagtcgcaatttcataaggttcaagtccgtacatgatatttttcactgtacgggcgacgataacggctccgatcacaccgacgaagatgctgacgcaaataataaagtaaagcggccgtaagctatggctgatcacttcatcaatttcatttacggtgatgccgaccgcgactgcaccgacttgttttccattctccgcgtagacagggacgaacgctctctgcgatttcccgagcgtgccagaggctgtgctgatatggacatgcccttttaatacctcggactcatcaccgcctctgaatttttttccgattttgctcgggtcgggatgagttttgcggataccgttcatatccatgacgacaacaaattccgtgccggtaattttctgaacccgctttgtgtagctctgcagttccttttgtttttttccgttttctaaagcagcggctgtcatcggcgcctcagctaccatttcagcagtctgcagcgcagtggccttttcctgatctctaattcgtttggtggtttgggcaccgactgtaaaaaacgtaatgagcaatgcgattaatacaacgatacaaacaaatatggtgagtctggtttgcagttttaatgtttttttcatataaaacttccttacgttttatgattcctgcgtactactttactctcaaaatgctgctttgtgaagatttgggaccgtaattcgtaaaaaggagaaaaaatggaataatttatcttgtcaatgtgttttaagtcctccataataaatgaggtagattatagaaagggacttttttatatgaaaaatacttatttgacaggatattttccgctgattgcgatcctgctttttagttcgtccttatccatctcaacttcactttatgcgttgaagatgctgtcttcatttggaatgtatgatggaatgctcgattatttttcagagaaaggaatcaggcttgcgttatttgctgcctttgcacttttatattttatggttctgtccgctctgaaattaattgcaaataccgtgaccgagctgtcattgctgttttttgctaatgatccggaagggaacaacctgaaaaaactcagaatgggttccatgatttatttgggcggcgggattttatcctttgtgctcttgcaaaatgtcatttggattgtgatctggtttgcggtcgtcacgctcgcttactttgtgtttaccgtataccggatttattcgacgctttctctcatgtcattagttggattcattctattggaactgctgttttggtttacctttgttatcggtattctgttcatatttatcaagctttataatagcataatggatagcttacctgtgtaagctatccatttcagcgtttggtggtcagatttgcgcttcgtgctctgtgcgcaatgaaacggcggctagattctcaggtttccgccgtttcacaacttcaaaagttttcaatcacgctgaatagatgacaaaatcctaaaacgaagccgttttaggattttgtcaacaatctgtgatggctagcttcctagccattttttatttacggtaaaaatctttttttaatagaaggggaggggagcatacattcattttttttgccaaaccacttatagcggttgttggcaatgaaagaatagaccatatctctgacaggcttcggcactgcgaaaaacaggacgaagagccgccatgggcctcgcagatgcctgaaaaccttaatggctgcagttgactttgtgtgcacttggccgtcttcaataaagacaaagctgtcaaactgatcagtcgggagcccgctttttttcagcaggctctgccctgtttccgactgcagcgatgtgaaagaaatcaatccgtccggatcacgtttaatgataaattgcacggcgccattgcataaattgcagacaccgtcaaacagcaaaacgcgatttggaatttgttctgaagtcaccccatatcccctccgatcctttaataagccgcttgcagcgttcctttccagatggaaagctgagggctgatgctgtgaagatattcaacgctggtcggtgtatcctttccgacccagacacccattgtatacgtatcagtcaggccgacaaaccacatatcgtgataatcatttgatgttccggttttaccgccgatgtaaggcgcattgaaatatgcttttttccctgttccgcttttcacaacggaagacatcagttttttcagctgcatgttcgtgcggacgctgaatatttgagtcgctttatcattccatttataaagcgtttttcctttaaggtctgtcacctttgtaatcgcatggctcggcgtatagcttccgctgttgccgaatgtcgtataagcctttgtcatctcaagaggcgtcatgccgtttgtaaatccgccaagcgccgccggaagaagatagtcgctgtcgacaagtttggcaaaatgataaggctcaatataactgaatgccttttggatgccgacgcggtcgagcattctaatagctggggtattatatgaatttttaaacgccgtatcaagcgtcactgtgccgtaagtgcggttattgtagttttgcggacagtagtctttgctgcaaaacttgctggcatcaatggtgctgcttgttgtcgcgccggtttgttcaatataagggccgtaatcaagaagcggcttaatggatgaacccggctgcctgtacgcctggtaggcgcggttaaagtcatatttttgatagtttttcccgccggatagagcgatgatttgatgcgtctggtgattaatcacagccgctccgccctgtacgtccgcatacgggagcttggaattcatttgtgccacaacttgattttgcatgtacggatcaagtgcagtataaattttcacaccgtctttcatcagcgtgctgactcttgcggacagctcgttctcgatcttttctttttgttttcctgatgctttttgaaggcgtttatcaaagccttctgattcagacaccagctgagtgaattcatcattgacgtaggaaacgtagtcaggatatttgtcttctcttttttcaacatccagtttgattttttgttttacggcttttttcagctctttgtccgtaatgaccccggcatcttttagccctttaagcaaacgttcttgacggcttttcgtgtagtcaaaatgcttgagaggatcatataatgtagggttattaggtatagcacagataaaagccatttctcccactgtgagagatttcagcggtttgctgaaatagaattgagctgctgaaccgacgccgtaaacaccgttgttgaaataaatggtatttaagtaagcttcaagaatttcatttttcgtatattttttctccagctgataggaatacgcgagctctgtcagcttgcggctgaaagagcgttcatggctcaaatacaagtttcttgaaagctgctgtgtgatggtgctggcaccctggtcaattttcttgtcttttacgttagaagcagtagcccgcaccattcccataaagtcaaagcctttatgctcgtaaaaatggcggtcctcagatgttaagaaaatctgtttgacttcctcgggaatgttgttaaatggaacgagcacacggttttcgtggtcgctgacgatttccgagacaagggagccgtccctgtcatacatgtagctgttctgaacaaggctgatatctttcagattaatatttttatcaagcacctgatccagggacttcatttgttttacttcttttccggaagcgataactgtaaatgcaaacaatgggattatgcaaaggagcaaaatccatccgattatttttcgtaacatggtcactctcttttctcctaaattctagccatatcgtaccattcttttgagattacgagaaggttaaatttagaagattcctcagttttttctcggaatcagcttgctttggcataagaatctttccgaagtttctgcatgatccaaagcatgcaggcgccggcgaaaaagagaaacgccgtgacgtaaaaggtggccgaaatggtaaaatggctcgatatgattcccccgagcagaggcccgagcacgtttcctaaaaagcgaaagctgacattgtagccgagaacttcaccctgaatgctgccgggagcctgaacgcggatcgctgccgtaatgcatggcagcaaaccgcccatcgccattccgaataaaaatctgaaaacaaggagcacgctgagtgaggacgcgagcgcctgcggaataaaaaagaaagaggcggcgagcaaaagtccgattaaaatgcggcggtggccgtagcggtcgcccagatcaccccattttctagccagcagcaaacttccgagccccgttgctgaaaatgccatgccggagaaaaaggcaagattgacaggtccgtgcagctcatttacatataaagcgagcaggggctggatactgaaattgcctgtttgaatcagcatggttaacagcatcatgacccacagcgccggatggtgaaaaatataggagagcacttcttttctcgagtatgacgtacgtttggctgttttctctgcaagaggcttttctttgacaccaaataacacgagaagaacagacgagaaaattacaaaggatgtgataaaaaaggtatacgtaaagccgaaacgatcagcaagcatgcctcccaaaagcgggccgaacaagcttccggacacttgccccatttgcagcgtgccaagcgttttgccggctgagctcttcggagtctgtgccgaaatcatcgcaagagatgtcgggatgaatccggttacaagacccattgccatacgcagaaaaaacaattggtacaccgatgtaacaaagcccatgaagaaaatgctgagggcaatgcccgttccggttgccataaggattttcttgtatccgcgtttgtctccgaaccgtccccaaaacggggataccaaaaacgccatgagaaatgtaatgccgaacacatagccgctccacctttgcacaaagccgtttgaaaaagagctgagcgtctcaatgtataaggagagaaaaggaacgatcatcgttgtgctagcggagacaaaaaagttcgccagccacacaatgacaaagtttttcttacggatagaaataacatcaccttcttattatttcgggttccttactaattataaagaaacgattcacaatttaaaagaaacgaagcggctgggaaaattcattatttttagaaaatgaagaaatgtcgagaaggggaattgatatactataaagatagcattttctgatcggaggaaaggcaggtgtaaaaaggtgacgacaaacagcttactcattattgatttcgaatttacaatgcccgacggaaagtacagtcctcaaaacttcttcccggaaatcattgaagccggaattgtaaagtcgattgatgatgaagtggttgagacgttttctagctatgttagaccgaaaaagttcccgaagcttacgaaacgctgcaaatcatttttaaaaataacccaaaaacaggtagacgaaggaatgagattcgaggatttcatccgtaaactaaacgagctggatcctgagaaaaacagcacaataattacgtggggaaacatggatatgaaagtgctgaagcaaaactgtatgtttaatcatatccctttcccgtttaagggagaaatgagagatttatcgcttgaatacaaaaacttttttggagaccggacattgacgggtttatggaaagctgccgaagagtatggagattccggaaccggcacccatcataaagcgcttgatgatgctctcacagcatataaactttttaagcttgttgagcaggataagcagtatctcgaaaagccaaaaccgcccacaatcggcgaaagaatcgatttaaccgaactgttcaagcgcgcgacgtgaaaaacccaatcttttgtcagactgggttatggctggttaaaatattctttttctaaaatgtccagattatgaagggagcgttttgcccactccgaaccatcctcattcaatttggctctcagctgtgctgtcgcctcccgcagagattcggtataatccggcacttcaccgtcataaggcttcaccatatggtgggggatattggtctgttcaccatatgcgagcgcttttctctcatggaaaaatggcacatccgcctgttttggatgatgaaggtctccttgagagggatgggtaagaaccgctttcactttcactaaatagtgctgcggcctgcaagccgtgatttctcctatgtatacacctgttttgtaaaatcctttaacgatagagcctgtctcaaacgtgctcatctgtcatcacctcgcattcattctattaaagttccaatcgatttgctagtgaggaagatcagcgggaagcttaatggtcaccatagtgcctttttggaagctgctgttaaatgagatggtcccgtgatgatgttcaataatggaaaaggttacggtgaggccgagtcccgttccgttcgtttttaaggaataataaggttcgccgagtttttgcatttgatggtctgtcatcccgaccccattgtctgtgatgttaatcatgatcgtatggccgtttcttttggctgatatgtggatcatccccttcccgtgaggaaccgcttcaatactgtttttcatcaggttgatgacagcctgcttcagctttgttgcgtctccgtatatcaaaaggtccggttctgtttcagcctcgacggttactgacttgtaattggcgtacgacaccataagggagcttgtctctttgataagggctgataggtcaaaaacctctttttcgtataattgctgtttggccatatcgagatagtttgtaataatgccttgcgcccggtcaagctctgacagtacaagctttttgtaatccgcactcgacttgttttgtagggtttcgtcattaaaaagcagctggacaaacccgcggacaactgtcagcggattcctgacctcatgggcgacgctcgctgccagttcactcacaatcgtcattttttcagaatggataagctgtgagcgcagggcgatattttcggcgatgctttcgataatatagatgcttaatagaagaacactggagcggaaaagccctgagactgccgcctcgtaaacgaaaattcctgatttttgaaaatttaaaatattcaaggcggatagaatccagcttgaggcgaaaaataggaaaatctccacgcagctgatcaataaagacagcagcagttttttcgctttggacatgaatggccattttttctgaaataagattgggataatgataagaaaaggcagcaaagtgaaaacaaacattgcggaaggttcgtaaaaaagcagttcaaaacataggacagatgcggcgactgtaagtccggaagcggtactaatgtaaaataaacaaatgataacgggaatcatctgaaggccgtattgtatgtagtccatttcatgaatcgggaaaataatgcataaaacggaggcgccgcaggcgaagagcgtgaccaaaccgctgtttatttttggcacaagaatcgcaggttttccaagccaaaacacttggtaaagaagaataggaaacaaaataaagcagatatgcagaagatagtcttttagaatttccattcgtgtaaaatcctttcgtataaaatatgaatctattataacactaaatattagaagtaaaatataaaattcctttattaagaacgcctttacaaatgaagacgtaaaggcgtttacagctatatttacgataatgcggctttgatgcggcgcaggccgtcctgcagggttgcaagagagcatcccgcgttcaggcgcataaatccttctccgccaggcccgtatttcgtcccgggctctaaaataacttttcctttttttagcattctttgctggagctctgtatcggacaagccgtaagcgctgaagtcgagccaaatcaagtatgatgcatccggcttcatcattttgacctttggcagctcggtgctcaaaaaggcttccgcttcgttcatgtttttctcaatgtaagtgatcaattcatcaagccacggtccgccttttgaatacgcggcttcgattgcagtgacggcaaacgcgttcattccgcctaaaccattgcgctgaaggcttgcggaaaacttggcgcgcttcaggcgatccggaataatgatcgctgaagcctgcaatccggcgatattaaatgttttgcttggagcagcacatgtcacagaaatatcagcgaaatcgtcagagagcgaagcgaacggcgtgtgtttgtgtccgtacagcattaaatcggaatggatttcatccgatacatctgttacgccatgctcaaggcacaattcgcctagcttcagtaaatcttcccggccccatgaacgcccagaagggttatgaggattgcataaaataaacaatgtaacgcttgggtcactaagcttcgtctccaaatcttcaaaatccattgcatatgcgccgtctttttctagcagcggattatgtaaaatgtgccggccgtttttctccaccatatggtaaaaaggcgtataaactggaggctgaacaactacttgatcgcccggctccgtaaaagcttgtaccgccatgctcaaggccgttacaacgccggggctgaatgtgatgctttccggattcaccttccagccgtgcctgttttgcatccatccgcacacagcatccctcgttttttgatctggagttgtataaccaaaaataccgtggtcaagacgctcttttaacgcttcagttattgcttctggcgcgcgaaaatccatatccgccacccacatcgggagtgcgtctgtcacgccaaataattcgcctgttttgtcccatttgaccgattgggtgccaaggcgttcttctcgtttatcaaagttcattctgttaccccctcatgtatgtttattcttctaagcttcactatgataagatagaactgcaaattttattataagcggtgatgaatatggaagaaagtcaagcggtcagggaaatgattaagatcattgccaaatgggacccgtttaaatatggagaagagttttacgaaacggaggctgttgatgtcgtgcaggcagtctatgatgaagacgatcccgacgtgctggcgaaaagcattcagcaaatatttgaaacttcttttgaacaaacgctgccgatcgacagctgccgggaagtggctggccagcttttattcattaaaaacagcagctcctgcacgccttaaaaaaaccggttcagcaccggtttttttaattgataaaatcagcaatgtgttcagaaacaagttcaggccgttcttcaggcaccagatgtccggtctggccaagtgagtacagcacggaattaggcaaatctgcgtgcagccgtttaccgatctccattgggacaattcgatcctcctcgccccaaatcaatagagcaggcttgttcattttcttcaattgctcgggttctaaatctccttctctgtggcggataaaccttgtcatggctttgaaaatctgctcgtcctgaaatggtctgccatagccgtcgatcatctcctcatcaatcagcgatttgtcatgcaccacatttaataaatttttcatcacgccttctttcgagagccagcgtttgatgtaaagatgaaaatacgggatatgggtcccgaaaatgatcgtcgggtgtgaacgttttaaataccctgaactgcaaagcagcacaacctttgaaaaaagctcaggtttttggagagcagcagacagcgatatctgcccgcccatagaatgcccgacaagcacagcctgtttcacttgcaagtgctccaaaatcccaatgacaagcttagcaaggttttgataggtatagataaacgttcttgatttttcagattggccgaaaggaggcaaatcaagcgcgatgatgtcgtacttgtcccgaaggagaggaattacttttctgaagctgaatgcagatgataaaaaaccgtgtacgcagaccagcgtttgcctgccgggattttgataatgttcgtagtatacattgactccatcgaccgtaaaccgccttattggtgaaaccgcctccattctgtgtcactccctttttttgatggttgtattatgccctgaaattgtaaattctagcggaagtttctcctcgttttttcttagcattcgtcaaaaaacgtgatataatgtcatgagatttcttgacattgcaaaggtgtgaatcaaatgaaattgacagaaaaagaaacagaaatattagaaattttagacgaaaacagccgcgccgatttagaaacaatcgcaaagatggcgggcatccctgtaaatgaagtaaaaacaattattgacaaactggagaaagaaaaggttattatcgattattccgctatgattgattggcgaaaagtagacggacatgagggcgttacggccatgatcgacgtcaaagtaacgccgaagcggggcgtcggttttgatgaagtggcggaacggatttaccgattccaagaggttgaatcagtttacctgatgtcaggcgtatacgatttgtctgtcgtgattcgcggcaattcgatgtctgacgtagcgcgttttgtttcggataaactctcaacgcttgattcagttgtatctacgacaacccattttatcctgaaaaaatacaagcatgacggcaaagtgtttgaaacaggagacgacgacaaaagaatcgtggtgtcaccgtaaatgacttcgtatttatcagactatgtacaacaaataaaaccatccggcatccgcaaattctttgatttggcggcaacgatggaaggcgtcatttctttaggcgtcggcgagcctgattttgttaccgcgtggaatgtccgcgaagcaagcattctctctcttgaacaaggatatacgtcatacacggccaatgcgggtttatactcattgcgggaggaaatcagccgttatttgagcaacaggtttgatcttagctactcgccagataatgagctgattgtgacagtgggggcaagtcaggctttggatattgcgatccgcgccattgtgaatccaggtgaggaagtcatcattcctgagccgtgttttgtggcgtacgatgcgcttgtttctttggcaggcggtatcccggttcacgttcatacaacggcagacaaaggatttaaagcaacggctgctgattttgaagcggcagtcactgaaaaaacaaaggccattctcatctgctcaccatcgaatccgacaggttcggtttattcgaaggaagagctgaatgagattgctgaatttgccaaaaaacatgatgtcatcgttttagccgacgagatctacgcggagctgacatatgatgaggaatttacaagtatagcggcattaccgggaatgaaggaacggacggtagtcatctcaggcttttcaaaagcatttgcaatgacgggctggaggctcggttttgccgcggcaccatccttgcttcgggatgccatgcttaaaattcatcagtatgcgatgatgtgcgcgcccgcaatggcgcagtttgccgcccttgaaggcctgaagaacggcatggaagacgtagaaaaaatgaaaaaaagctatcgaagaagacggaatctgtttgtagaatcgctcaatgaaatcggtctcagctgtcatcatccgggcggcgctttctatgcttttccatctatcaaaagcacgggaatgagttcagaacagtttgccgaggagctactgacgcaggaaaaagtggccgttgttcctggaagtgtgtttggtccgagcggtgagggatatatccgttgttcatacgcaacctcgattgaacagcttcaagaagcgttagtcagaatgaaacgcttcctgcacaaaacaacataaaaaaagatacgaaccttttgttcgcatccaataaaaggggggaatactagaaagcctttggtattttcagtttaccccctttttgctgtgcataaacctgattttttataaaaaagttttctttgcggaaataagacatgtgtgatataattttaaattgcgtataaacagatatttaatttaacttaggagttgttatgaatggcagcaaaatttgaagtgggcagtgtttacactggtaaagttacaggattacaagcgtatggtgcgtttgttgcattagatgaagaaactcaaggtttagtacacatttctgaagtgactcacggtttcgtaaaagatatcaacgagcacctttcagttggcgacgaagtacaagtaaaagtacttgctgttgatgaagaaaaaggcaaaatcagcctttcaattcgtgcgacacaagctgcgcctgagaaaaaagaaagcaaaccaagaaaacctaaagctgctcaagtaagcgaagaagcttctacaccacaaggtttcaacacattaaaagataagcttgaagagtggatcgaaatgtccaaccgcaaagaccttatcaaaaaataagcatgaaaaaaagcaccggacaggaatgttcggtgcttttgatttcatgcaaaatcctatttcagcgtgattgatatcctatcgcatttcaggatttgctgcttcttcacgtgatctttcctcgtttggcttaaatagcagaccgaggttgattaagccggcgattccgacaagtccgtaaatgattcgggaaagagctgacccttggccgccgaagatagccgctactaagtcaaattggaaaaatccgatcagtccccagttaatggcgccaatgatggttaatacaagacaaattctttgaatggtactcatgttttgcaacctcctccatgaattattaaaacagttatagattgtgacatattggagaatctatacatgcattctccatatgagggaagctggcctgccctcgcttatatcagcttctttcccagcaccttgcaaaataaaaccatctggtatgctgatcggtgagagctgattgctttacatgtggtgaggacattctgcataataaaaaatctaaggaggagatgtcatgcaaaactttacatactggaatccgaccaaattaattttcgggcgcggcgaagtggaaagacttccggaggaactcaaaccttacggaaaaaacgtattgcttgtgtacggaggcggcagcattaaacgcagcggcctgtatgatcaagtgattgaacagctgaataaagccggagctaccgtgcatgaattagcaggtgtggaaccgaatcctcgtgtgtcgactgttaataaaggtgttgccatctgtaaagaacaaaacattgatttcttgctggctgtcggaggcggaagcgtaatcgactgtacaaaagcgattgccgcaggagcgaagtatgatggtgatgcgtgggatatcgttacgaaaaagcatcagccaaaagatgctttgccattcggaacggtattgactctcgctgcaactggttcagaaatgaactcaggatctgttattacaaactgggaaacaaaagaaaaatacggctggggcagcccgctcgtattccctaaattctcgattcttgatccggtgaatacattcaccgtacctaaaaaccacacgatctacgggatggttgacatgatgagccacgtattcgaacaatacttccatcatgtatcaaacacgccgtatcaggaccgcatgtgtgaatcacttttgcgtacagtcattgaaacagcgcctaagctgatcaatgatctcgaaaattacgaattgcgtgagacgatcctgtacacaggaacaatcgcattaaacggcatgctttctatgggggcaagaggggattgggctactcataatattgaacatgcagtatcagccgtttatgatattccgcatgccggcggactggcaattttgttcccgaactggatgagacacacattgtctgaaaaccctgcccgcatgaaacagcttgcagttcgcgtgtttgatgttgaagaagcaggtaaaacggatgaagaaattgcccttgaaggtatcgataagctgtccgcattctggacaagtcttggcgctccgaaccgtcttgctgattatgatattaatgatgagcagcttgacacaattgctgacaaggcaatggctaacggtacattcggccaatttaaatcactcaacaaagaagatgtgctgtcaattttgaaagcatcactataaaaaaaggggaaatagccatttggctgcttccctttttcttttttgtcaacttatgttacaatggaaaatctgttttttaccagcatcatttggaggttttactatggaaaatttcacttattataatccgacaaagctgatttttggaaaaggtcagcttgaacaattaagaaaagaattcaaacgatacggcaagaatgtactgcttgtttacgggggcggcagcattaaacgcaacggcctttatgatcaagtcacaggcattttaaaggaagagggcgctgttgttcatgagctgtcaggtgtagagccgaacccgcgtcttgcaacagtgaaaaaaggcataggactttgcagagagcataacattgattttctgcttgctgtcggcggaggcagtgtgattgactgtacaaaggcaatcgcagctggcgtcaaatacgatggcgacgcttgggatattttcagcaaaaaagtaacagcggaggatgcgctgccgtttggcactgttttaacgcttgctgcaacagggtctgaaatgaaccctgattccgtgattacaaactgggaaacaaacgagaaatttgtatggggcagcaatgtcactcatccgcgtttctctattttagaccctgaaaatacgttcaccgttccagaaaatcaaacagtatacggcatggttgacatgatgagccacgtattcgaacaatacttccacaatgttgaaaacacgccgcttcaggatagaatgtgctttgctgttttgcagacggtcatcgaaacagctcctaagcttcttgaagatctggaaaactacgaacttcgtgaaacgattttgtatgccggtacaattgctttaaacggcacgctccaaatgggatacttcggtgactgggcttctcatacaatggaacacgctgtttcagctgtatatgatattccgcacgcgggcggtttggcaatactgttcccaaattggatgagatacacgcttgatacaaatgtaggccgcttcaaaaacctcatgctcaacatgtttgacattgatactgaaggcaaaacagataaagaaattgcgcttgaaggaatcgataaactgtctgcgttctggacaagcctcggtgcaccttctcgtcttgctgattacaatattggagaagaaaagcttgagctgattgctgatattgcagccaaggaaatggaacacggcggcttcggcaacttccaaaaattgaacaaagatgacgtgcttgccatccttcgcgcgtctctataaacccaaagggcggaatccagtcattccgccctttcttcttgacttgatttcacagataagttcatataaagtgaaagatgaaaacattataccgttatggagggacaagcaatgacgcatgtacgctttgactactcaaaagcgttgactttcttcaacgaacatgaacttacatatctgcgggactttgtaaaaacagcacaccataatatccatgaaaaaacaggcgcgggcagcgattttctaggctgggtggacctccctgaacattatgataaagaagaattcgcgcgcatcaaaaaaagtgcggaaaaaattaaatctgactctgatgtcttgcttgttgtcggcattggcggttcttatcttggagcgcgggcagcgattgaagcgctgaatcacgcgttttataacactttgccaaaagcaaaacgcggcaatccgcaagtcatttttatcgggaacaacatcagttcatcttatatgagagacgtcatggatcttcttgaagatgttgacttctctattaatgtgatttctaaatcaggtacgacaactgaacctgcaatcgctttccgtattttccgcaagcttcttgaagagaaatacggtaaagaagaagcgaaagcgcggatttatgcaacaactgataaagagcgcggcgcattaaaaacgctttctaacgaagaaggcttcgaatcattcgttattcctgacgatgtcggcggccgttattcagttttaacagctgtaggtctcctgccgattgctgtcagcggcgtcaacattgacgacatgatgaaaggcgccctggatgcgagcaaagattttgcaacatctgaactggaagataacccagcataccaatatgcggttgttcgcaatgtcctttataataagggcaaaacaattgaaatgctcatcaactacgaaccggcgcttcaatactttgcggaatggtggaagcagttgttcggagaaagcgaagggaaagatgagaagggcatttatccttcttcagcgaactattcaacagaccttcattctttaggccagtatgtacaagaaggccgcagagatttattcgaaacggtcctgaacgtagagaagcctaaacatgaactgacaattgaggaagcggataacgatcttgacggcttgaactatttagccggtaaaactgttgatttcgttaacaagaaagcattccaaggcacgatgcttgcccatacagacggaaatgttccgaacttaatcgttaacattcctgagctaaatgcatatacttttggataccttgtatatttcttcgaaaaagcctgcgcgatgagcggttacctccttggcgtcaatccgtttgaccagcctggtgtagaagcgtataaagtcaatatgtttgcgttactcggcaaacctggctttgaagagaaaaaagcagagcttgaaaaacgtctggaagattaatgtgagaaagctgactggcatttgccggtcggctttttataaaatcagaaaggtgctgatgttcatgaaacaattggttaaacatctcatcattgccggtttttctgcagctattttaagtttccttatctcctttgatgccgtgtatacagagttttcttcaagctttggcggcacgctgtcacactttttcatccacgcctttcttctcattggtttgccgcttgccctttttaccgatgcggtacatcggattttgcatttaaaacgaacccatactcttttcactaaattaggactctatgcaacggttgtttatgtgtcttgggattcagctgtatggcttgcagcggcaatggctgtttacttcttaattgaatgcgctttctttcctgttggccgcgcgaaagaaacaacgatttccatgtaggcgcctctgaatgaagtcttgtttggcgggacaggataagtgaaaaaaggggcattctgatgataccaataccttccgcgatagatgggcagtcttttctgcttcaagaactggaacaagtgatgaagccgctcggttatgtgataaacggcggctgggaatacgatcatggctactttgattataaaattgatgatagagacggctatttatttttaagaattcccgtcaatgcggtacagggcagtctcgatgaacgaggggcggccgtccggatcggaacgccatttatgctgagacaggtgtttcaggcggatgttgacgatcacgccgagggagggcctttccaatcactgtttaatcaattttccgaaccggaaaggcgggacgcggaaattgatccggcatttttggatatcggcgcctctctcgtgaaagaattggaggatgttctgttacactagatggcaaggaattggtctgtttcgagcaccttgtatgtaagaggaggggaaagcatcggtccctcctttttttgtacgcctataattgttgtgttgtgatcaaggaaatagagaacacaggttttgtaagccgctccctttagttcgtcaggaacagcaagaagctccacatgctgatcaagtgtcagcttgattccgatctgctgtttagacggccgtaacttgacttggtaatgctgcagcatcgcccggctgataaattctgaagttccgatgatttggtttgcgcctgcccgctctgcattggtgacaaaacggtcagtcaaaatttcgacgatgcagtaagcaaggggattaagccctttaacagataaaagagtcagcactgacagcatatcagcatcagtttcacttttatactgatcggcagtaatcatcactgattccgcttcagtaatattggcccgtttcagtgtcccatcatcggcagcgtgcccgcgtatgaaatgaacgttttcaataagcgggccttctgttaaggattcatcgattagtacgactgttttggaaggggcggcaagctgaaggtccttcaaaagccggtttgttttttcattccacccgatcagaatgatgtggtcccggcctttgtaagcaacttttccttcgatgtagcgatgctgtctgctgaatgcggccgctgataacgtagcgaaatacgctgtgacaaagcttgctccgctcaaaatcagcagtattccggctgcctgtcccagcggcgtgtgcggcacatagtctccataaccgactgtcgaaaccgtaacgacagcccaccaaataccttcgaataccgaagtgaactgcttaggctcaagtatataaatgatttggccgaacaaaagaatcagacataaaataataaccccgattcggataaataacggccacctgagccatgaaataaatatccgatttgatttcattctttttctccttcttcagatactgagatggataaaatctgtttaataattgtatttaatttctcatttagcttttcctggccgtacatatctcgggcctgcttcattaactcggctgtatcatcatcaagctgaataagcggttcatcaatttccgattcattatacagctggataaacgcgtccagtccttcattcattcggtcgattgctgtgctcagctgttccttttcctcactcgtcactttcatagcttccatcacacccgtgcttttttctaacagtatgtcccacttccggtgatgtttttcaaaaaatgtacaaaacatataaaaccggatttctccataaactaaaacaaaaaggatgaaaaagatgacgatctttcaaagaacgatcgtggttttaatcggtacgcagctggcggcatccgcggtgattttgtttattttcgatttgaattcatataatcacttttccggaagcttctcctggcttcattttctgaaagaactggccggcagtttcgccttttatttgttttcagcaggcctgttctttttgctgattggattgtgtgctccaagccggaagaaaaagcgcatttctgtacacgggaaagaaaactcattaaaataatcgtaatagagaaatgatcatggaaaaaggatgatgaaaaaatgctgtttatatttttaacaatagccgcattgggattgtcgttttgggcacaatttaaagtaaagagcaactttgaaaaatattcaaaagtggaagcctcaagcggacgtacaggggcagaaacggcaagacggattttagatataaacggtctttacgacgtgccggtcgaaccggtaagaggcactttaacagaccattacgacccgacaagacgggtggtgcgtttatctgagccggtctattacggccgctcaatttccgccatatccgtagcttcccatgaagtcggacatgccttgcagcatcaggagtcatatggtgcgcttgtgctgagacataaaatcttcccagtcgtgaattttgcatccggtgtagctcctttgcttttcttaggaggcatgcttctcggcagcctgaatttgatcgggcttggcatcatactgttttcagcggctgtctttttccagctgattacattgcctgtcgaattcaatgcaagttcacgtgcgaagcagataattgtgtcagaaggattcatccgaaacaatgaagaaaatggggtaaataaagtgctgagtgctgctgccttaacgtatgtggccgccgccctggtttccctgtttgaactacttcgttttgtgatgattttcttaaacggtcgtgatgagaattaacgttaaggaggtggccccttaccatttatggtaagggctttttttgcttattttacaattgatcgccatttttgttttgattggcattacggctgttttcgttgcagcggaatttgcgatcgtcaaaatcagaggttcaaaaatcaatcagctcatcgaaagcggtgacagccgagcactagccgcacataaaatcatctccaatcttgacgagtatttatcagcctgccagctcgggattacgattacagccctcggccttgggtggcttggtgaacctacatttgaacgttttcttcatcccttatttacaatgacaggcatgccggaaccgtttaaccacattgtcacatttgtagttgcatttatcatcgtcacttttttgcatgtggtgatgggggagcttgccccaaaaacggtttctattcaaaaagctgaagctgtaagcttatggattgcaaagccgctgatctggttttataaaatcacgtacccgtttattaaggcattaaacggctctgcaagctttcttgtgaaattgtttggctttcattcagtaaaggagcatgaggttgtcatcagcgaagaggaactaaggctgatcctttcagaaagctatgaaaagggagaaatcaatcagtctgaattccgttatgtaaataagatttttgaatttgacaaccgggtagcgagagagattatgattccgcggacagaaattgcggttatctctctggagcagtcgcttgaagaggcaattcatcacatcattaatgaacggtatacacgctaccctgtcatcaaagatgacaaggatcatattttagggatcatcaacagcaaagatatgtttaaagcttattttctcggccagccgataaagctggagcaaatcatgaggcccgttatcagagtcattgaaagcattcctgttcagcagcttttaatccgcatgcagaaggagcggattcacatggcgattctcgtagatgaatacgggggaacggcggggcttgtcactgtagaggatattatagaggaaatcgtcggggaaatccgcgatgagtatgatcaggatgaaacaccgcacatcctgaaaaagggcgagcaccattatgtgatggatggaaaagcgctaatagacgaagtgaatgaccttctcgacattgcgattgaaaatgaagaaattgatacaattgcaggctggcttctaacgcaaaaaatggagctgaaagcaggggatgtgatacatgcggagggctgtgaatttaaaatcctcgacgccgaagatcatcacatccgttttgtagaaattaaaaaaactgatttttaataaaaaacagccggggaacgaacggctgttttttatgtcatcaagtcatttcttaaaaagcaatgctgtgtagccttttttctacataggatatataagaccggtacactgggaaggagtggctgtatgaaaaaggcttggtggaaggaagccgttgtttaccaaatttacccccgcagttttaaagattcaaatggcgacggaattggggatattcaaggaatcagatccaagctttcttacataaaagagctgggcgctgacgtcatatggatttgcccgctgtatgactcaccgaatgctgataatggctatgatatccgggattatcaaaacatattaagcgagtttggcaccatggaagattttgatgaactgcttggtgacattcatgatctggggatgaagctgattatggatctcgttgtgaaccacacaagcgacgaacatccatggttcatagaatcccgttcatccatacactcggaaaagcgcgactggtatatttggaaagacggcaaaaacggaaaagcgcccaacaattgggaaagcattttcggcgggccggcttgggagtatgatcaagagacaagccagtattatctgcacctttttgataaaaaacagcctgatttgaattgggaaaataaacaggtgaggaatgccgtttatgacatgatcaattggtggcttgataaaggaattgacggatttcgggtggatgccattacgcatattaagaaaaaagaagggcttcccgacatgccgaatccaaaggggctggactatgtcccttcctttccttatcatatgaatgctgacggcattatggatttgttaacagagctgaaggaaaacacattttcccgctatccgattatgacagttggtgaagcaaacggcgtcgctgcaaaagaagcagctgattgggctggagaaaaaaacggcatattcagcatgatttttcaatttgagcatctcggcctgtgggatgtagagatcaatgaaagtattgatatcgttgcatttaaacgaattttaactgactggcaggacagtctggaagggatcggctggaatgctttgtttatggagaatcacgaccagccccgttcagtttctgtgtggggagacgacggagtgtacctgaaagaaagtgcaaaagcgctttccgctgtttattttctcatgaaaggcacaccgtttatttatcagggacaggaactcgggatgacgaacgtggcttttccatctattgatgactatgatgatgtcgcgatgaaacgcctgtatgaaacaaaaacagcgaaaggcacatcacacgaggatgtgatgaagattgtctggaaaaagggaagagacaattcgcgaacgccgatgcaatggaatgctggtccatacgccggattttctgaggccaaaccgtggatcggaatcaatgagaattacaaatggctgaatgccgaggcgcaaaaaaacgataaaacatccgtttaccatttttacaaaagcttgatcaagctgcgccaaacatatgatgtttttattaacgggacatacgagctcattttatcggaagatcagcaaatctttgcatatcttcggaaaaacgagagccatactgcactgattgcggtcaatctgacaggaacaccggcgttgttcaagcactctggattgccattgtcatcagatgcactcgtcttgtcaaatattgaagcagagccgcacaagcatatgacatcagcactcttaaagccgtatgaagcaagaatatatctatggcgctaatctccagccttagactggagtttttttgttgtatcaggtttatgagagcggtttaacaggaaaaaaagaacacagaaagaattaagcaatgagagcggacaaacgaaaggagaaacaaatgctgaaaacactgcaaatcaaaacaaccaaacgagatgaaatgattgatatcacccatgaggtggaaacgtttcttcaagaaacaggtataacgagcggcgcagcgctgatttactgtccgcatacgactgcgggcattacaattaatgaaaatgccgatccggacgtcaaaaaagatatgctcagaaggtttgatgaggtatatccgtgggaacatgagctggaccgccatatggagggcaatacagctgcacacatgaagtcgagtacggtcggagcttcacagcatgtcattgtggaaaacggccggctcattcttggaacgtggcagggcatttatttctgtgaatttgacggccctcgcacccggacatgctatatcaaaatgatgggataataggctgtttttttgacaaaagcatgatcgctgaacaaacgccgatagccggagggcttgtcacacccgccccggctgccgctttatcgaatgaaggcgcgcttggcattcggctatctcagtcacgacatgctcgaaaagctaatccctatgtgaaataaaaaaaggaaagccttgcatgagggatagttaatcaatggatgtaaacgtaccgagctttgccgaacgtaacttgataaactgaggtgacagatatgaacattcttcaatattcttataaaaaaagagggaaaattgagtttgtatttgaaggctggcctcactcaaaagttacaatggttcctatcaaaggctactattttgtccgctttatcaaatggagcagccaggatccaatcgtgacaagaaatgaccttgaaaaaatggagtgggctgcgaaccaatatttcggcacagcccccttctatcgaaaacgaaaggcatttgaaaccccatcgtccggaaaataggcgatggggctttttagcggacgatgcggaaaagagacggaacatccagtctggtcgcctgagacagaaggtaggctgactgtaaggctccttttttcctaaaagaattcagcttatcaataatttgctttccgtttaagattccaagaccatgggcaaaatatttatcttcccccagtaaaatcacattttcgcctctccattgcgccttttgcggatcaaattcaggattcttaaaatacaaacaatctccaaggaaaaagtggtgtcctgtttccgtatagatcggcaatttctcataatgccagtcatataaaataattctgtcaaagctggcattgaatttatcttctccgattgtatcgattaaggccaagtaataaatgataacgattgcggttgcgcattcaaacgcataaaacgggccgttctctgcaatgtcacgaatcgcttttgaaggcgacattctgtatttcagctccaaggcgccctccggtgaaaccctccaatacgttgtattcccgtatgtttttaaaaaagtggcaaacttcgccccgcttttgtgcagcgtctttgccgctgctacaatattcatccgcagtttaagctcaaacatcagttcagcaattgaatgataatcaaactgaacaggcgtctcaatcatctcttttaacagcggattcagattttgatcaatctgccaattttcaatatcctggggacggagcaattgtcctgatacaataatcatgtttagccccccttgttttttataagatatgcaaagagcttgggcaatgaaagttaaaaaggcagaagacagccaaaaagaacttcttccattttttattttaaaacttttttaagcagccgatatatactgtatcaaacctgaaggagcaagtgacatgaagacttttatcaattggctgaagaaaccgtctatttcaaagaaattaatcgtctcatttattgcgattctcattatccctattcttatattagaatttagttcttaccgaagcgccagcggaaagctggatcaggaaattatgggaaatgcgaaaaacagtgtcgatacatttaatacaactgttacaaataatctgggagaaaaagcgaaagcagtcacctttttcagtgaatctcttaaaagatccgcattcaaagggaaatcgaatcaagaagagatcaaagctaaattttcacaatatgtatctattaatcaaggagtagccagaatttatgggggcgcagataacggcacttacgtacaagcgccaaaagagaaattgccggacggatacgacccgagacaacgcccttggtaccaggatgcgatgaaggccggcggtgaaattgtcgtgacagatccttacgtggctgcgagtgacggaagcatggtcattaccattgcacaggagctgaaggacggatctggcgttgtcgccatggatattaccattgataaattgttagaacaaatgaaacaaatcaaggtcggaaaagaaggttatgctttcattgcaacaaaaaacaaaacctatgtcgcccacaagaaccataaggctggagaaaagctttcaggcgactgggtagccaaaatgtatgcgaatgacagcggtgaacttcagtatactcttaataacgaagataaaaagatgacctatactacaaacgaactgactggttggaaaatagccggcacaatgtatatggatgaaattaaggatgcctcaaagtctgtgctgacaacaggaatgattgtgctgattgcttccattgtggcaggcggaattttaattctgtttatcgttcgttcgattacaaaaccgttaaaacgtcttgttcaatcatcgaaaacgatcagcaggggagatctgaccgaaacgatcgaaatccattcaaaggatgagcttggggagcttggggaaagcttcaatgaaatgggacaatctctccgctctctgatcagcgctattcaggactcggtgaacaatgtggccgcatcttccgaacagcttacggcatctgccgggcagacgagtaaagccaccgagcatattacgatggcgattgagcagttctcaaacggaaacgaggagcaaagcgaaaaggttgaatccagctctcatcagctgaacttaatgaatgaaggactccagcaagtctcacaaacatcgtcagatattacaaaggcatctatccaatcaacggaaatcgccggaacgggtgagaagtttgtgcagcagacagtcggacaaatgaactcgattaatcaatctgttcagcaggctgaagctgttgtcaaaggcttagaaggaaaatcaaaagacatcacaagcattttgagagtcatcaacggaatcgctgaccaaacaaatctgcttgcactaaacgcagccattgaagcggcgcgtgccggagagtcaggacgcggcttctctgtcgtagcggaggaagtgcgcaagctggctgtccaatcagccgattcagcaaaagaaatcgaaaagctgatccaagaaatcgtcgcagaaatcgaaacctctcttcacatgtttaaagaggccaatcaggaagtacagtccggacttgttgtcacagacaatacaaaagaaagcttccagagcattttcagcatgacaaacgaaatcgcgggcaagctgcagacgatgaattccaccgtcgagcagctgtcagaccgttcacagcatgtttcagcagcagtcagcggcattgcagacgtgtcgaaagaaagctcggctagcatccaggacattgccgcatcagctgaagaacagcttgcttccatggaagaaatcagttcctcagcgaccactcttgcgcagatggcagaagagcttcgtgatctgacgaaacaatttaaaatcgagtaaaaaccgaaaaacagtgctatcaaagcgctgttttttatatggtaaacaataataaagtcctagtttaacaggttaatttagaactatttttcattttttcctccattttcaatgtaatttaaaggaagatccgccgatataatttgtaaattattgaaagaaggttcaaaaggaaatgaaaaaaacactcaccactattcgcagatcatcaattgcaaggagacttattatttctttcctgctgatcttaattgttccgataaccgccctttcggttagcgcttatcaatcagcagttgcctcacttgatgtacagatgacgcaaagcgcaaaggaaaatgttcagatattagatcacatcattgatgataaaatcagcacgactgaaaaaagcctcgcatatttcagcgattgggctacagaagaaaagtttcaggataaaaagaaaacagagctgaaacaggaatttaaacaatttatccaaatgaatgataatgtcgctgcggtattttcaagcggcaaagacggggaattcacccgttatccgtacgctgacatgccaagcgactttaatgctttggaacgagattggtacaaagaagcaatggccaataaaggcaaaacaattgtcactgagccttatgaatcgatttcatcaggaaaaatggtcgtcaccatcgcccgtcaaacggtggatgggtcaggcgttgtcgccattgatatgaaaattgatgacttagtcactaccgcgaaaggaatcaatatcggaaaagaaggctatgcttttattttgagccaaaacaagaaagtcatcgcctactccggagaaaaagcgggaacagagctaaaaggggactgggttgataagctctacaaggataaaagcggggactttgaatatacgtacaaaggcaaaaagaaaaaaatggcatttgcaacaagcgaaacaacaggctggaaaatcagcggcacgatgtatgcaaacgagattcacgatgctgcaagcagggttctgatcatggcttcaatcgttctggcgattgccatcgcagctggaatgacggcgatttattttgtgattcgatccatcacaaagccattgagacgcattgtcgcatccgctgaaaaaattagtgaaggcgatctaaccgaaacgattgaaatcaattcaaaagatgaactcggcgttctgagcgagagcttcaatcatatggcacactcgcttcgctcgctcattcaggggatcaaagactcagtagaacacgttgcctcatcgtccgaagagctgactgcatcggcagaccagacaagcagagccactgaacacattacaatggctatcgagcaattttcaaacggcagcgaaagccaaagcgagaaaatagaaacgacaaccgaacaaattaatgaaatgaatgacggattggcagagctggcgcgggctgcagcagtgattacagaaacatccgcagattcaacagaagtgtcaagtaaaggggagacactcgtccagaaaacagccggccaaatgaacacaattgaccattctgtaaaagcagcggaacaagtggtgaaagggctggagatcaaatcaaaggatatcacgaatattttgcgtgtcatcaacggcattgcggatcaaaccaatcttttggctttaaatgccgccattgaagcggccagagcgggtgaatacggacggggcttctcagtcgtcgctgaggaagtgagaaagctcgcggtacagtcggctgactcggcaaaagaaattgaatcgctgatcagtgaaatagtaaaagaaattcacacatcactgaatgtgcttcagtccgtaaacaaagaagttgaaacagggcttgtcatgacggatgaaactaaacagagcttcaaacatatatctcaaatgaccaatcaaattgcttccgagctgcaaaacatgaatgcgacggttgaggagctgtcagcgggagctcaagaaatttccgcagcttcaaatgatatcacagccatttctaaggaaagctcggatggcatccaagatatcgccgcttcagctgaggaacagctggcatccatggaggagattagttcatctgcactgacgcttgaaagaatgtctgaagaactccgtgatctgacaaaacaatttaaagtagataaataataggtctaaaatactatttatttatgggaaattagttacttttgttaaatttcttcttttttgctgtatatatttacccatttccagccgatatgaagggtagcataaaaaaggagaaatgaatgatgaaaaaaatactccaactcataaaacaaagatcaattacacggaagcttctcgtttcctttctgtcgatcctcatcataccggttgtcatattggcgatctttgcgtatcaatcggctagcagctcactcgacagacagatgatggggagcgcattggaaaatgtacagcaattaaacgaaatcattaacaccagcatcggcgaaaaagaaaacagtgctgattatttcagcgaatggctgacaaaagagaaatacaatgcaaaaagcaatgcaagcattgcagagaaattctcacaatatatcagccttaacaaggatgtagaatccatttatacaagcgacacaaaaggacactttacccgctatccggatcttccgatgccaagcggctataatccggttgaacgcgactggtacaaaaaagcggttgcaaataaaggaaaagtcgttgtgacagatccttataaaactgcttctacaaatacgatggttgtgacaatcgcccagcagacaaaagatggttcaggcgttatcgcaatcaacatgacgattgaaaatctgttgaaaacaaccaaaaaagtcaacatcggcacacaaggctacgcatttatcatgacgaaggacaaaaaagttgtcgctcatcctaatgaaaaatcaggaactgaattaaaaggcgactggctcgataagatgttgagtgctgataaaggcgattttcaatacaccatggatggcgataagaaaaaaatggcctttgacacaaacaagttgacgggatggaagatcggcggcaccatgtatttggatgaaatccatgaggcagcccagcctgtcctacaccttgctttaattgtcttggccgcagctattatcatagggattatcgtcatgactttgatcattcggtcgattacaacaccgctgaaacagcttgtcggttcctctaagcggatcagcgagggagatttgacggaaaccattgatatccgttcaaaagatgaattgggcgagcttggcaaaagctttaacaatatggcatcgtcacttcgttctctcatacacgccatccaggattcggtagataatgttgccgcttcctctgaggagctcactgcatcagctgcgcaaacgagcaaggcaacagagcacattacattggcgattgaacaattttctaacggcaatgaaaaacaaaacgaaaacattgaaacggcagcagagcacatttatcaaatgaatgacgggttgacgaatatggctcaagcttctgaagtgatcactgattcatctgttcaatcgacagaaattgcaagtgaaggcggcaagcttgttcatcaaaccgtcggccaaatgaatgtcattgacaagtccgttaaagaagcggagcaagtcgtacgcggattggaaacgaaatcgaaagatattacaaacattttgcgtgtgatcaacggcatcgcagaccagacgaacctgcttgccttaaacgcagcaattgaagcagcgcgcgcaggcgagtacggccgcggcttctccgttgtagcggaagaagtaagaaaactggcagtacagtcagcagattcagcaaaagagattgaaggattaatcatcgaaattgtgaaggaaatcaatacatcactcggcatgttccaatctgtcaatcaagaggtgcagacaggacttgacatcacagataaaacagaaatgagcttcaaacgcatttctgaaatgacgaaccaaatcgccggcgaactgcaaaatatgagtgcgacggttcagcagctttctgccagctccgaagaagtttcgggagcgtctgagcacattgcatcgatttcaaaagaaagttcagcgcatatacaagatatcgcggcgtcagccgaagagcagcttgcttccatggaagaaatcagctcgtctgcagagaccctttcgtctatggcggaagagcttcgcgatatgaccaaacgattcaaaatcgaataataagccttaacacccaagcttgttgcgcttgggtgttttttttagtttttttattaaaccttttatcctagtttgacgatattagatttatcttaaaggaggagtcaacaagaatgggaaaattcatacattggatcaaacagccatcgatcagcaaaccgctaatcgctgcgtttctggcagtgcttattttgccggttggggttttagcatatttcagttatcaatcagcttggaacgcgttagacagagagctcataaacagtgcgaagggaaatgttgaagaactaaacagtacgctgcaaaataaattagaagataaagtaaaagcaatagattattatagtgagacagtcgataaagacatattgctaggcaaaaacaaaacattactgaaagagaaatttaagcagtacacgacacttaacgacgatgtaggcgcaatctatgctgcttcagaagataagaagctttataaatatccggatagcggtgttccgaaaggtttcgatccgacaggacgtgactggtacaaacaggcggttgcggaaaaaggacaagctgttttctcagaaccgtatactgatgaagcgacaggagatatcgtggtcacaatttcaaaacaattaaaagacggttcaggggttatagcgcttgatttaaacctggatgaagtgcttactgcatcacaaagaatcaaaatcggtaaagaaggctttgcatttattacaactggcaacaaaaaatatatcgcccatccgaccattaagccggggacaaccggttccggcgattggacaaaccaagtatattccaaaaaagaaggctcatttgaatatacattcgaaggcaaagaaaagaaaatggcctatacgacaaataaactgactggctggaaaatcgcaggcacatattttgtcagtgaattgcaagatgcttcaagcccggtgctgaacactgcggttatcattctatgcgtgtcaattgtaatcggcggcatactcattctctatattattcgtgccatcaccaagccgttaagaaaacttgtctcaacgtctgcaaaaatcagcagcggagatctcacagaagtcattgacattcactcgaaaaacgagtttggccagcttggcgaaagctttaatgaaatgtctgcatcattgcgttctgtaatcggcgttattcaaacgtctgtagaaaacgtcgcttcatcttctgaggagctgacagcaagcgcagcccaaacaagcaaggcaactgaacatattacacttgccatcgaacagttctcagatggcaacgaggcacaaagcgagaaactggaaacaagctcaaatcatctttctcaaatgaacgaggggatttcaaaagtggctcaggcctcttcaaccattacgaaatcatcaattcagtcctctgaggcagcgggcagcggagaaaagctggtggagcatacagtcggccagatgaaaacaattgaccaatccgttcaaaaagcggaagcggttgtgaagggtcttgaaacaaaatcgcaagacatcacaagcatcttgaatgtgattaatggcattgctgatcaaaccaacctgcttgcattaaatgctgcgattgaggcggcaagagcgggagaatacggaagaggtttctcagtagttgcagaagaggttagaaaacttgctgtacaatcagcagactccgccaaggaaattgaaggattaattcaagagattgtcagggaaatcagcacctcactttcaatgttccaatccgtgaatcatgaagtgaaagaaggcttgcagattacggatcaaacagcggaaagctttaaacaaatctatgagatgacaacccaaatttccggcgaattgcaaaacttgaacgcgacggttgaacaactgtcagccggatcacaggaagtgtcaagtgctgttgaagatatttctgcagtggcgaaagaaagctcagcaggcattcaggatatcgcagcttcggcggaagaacagcttgcgtccatggaagaaatcagctcttcagcggaaacgttggcaaacatggcggaagaacttcaggacattacgaagaaatttaaaatagaatcataatgaaacaagaaagcggcatatctgctgctttcttttttgttaaaagcaaaaataaacaaaaacaattcaaaaacaaacagaaatcatatataatgaaaacggatacaaataaaaggggatggaggaatatcaaatatggcgaaacatatatgggattcagagcgagctgcacggctgcctaaaggtgtagaggaattggtgtacaggtccaatctgatcgggtcagaccgcactgtctgcaactggggcggggggaatacatctatgaaaacaacggaaaaggattttagaggccgtgaaatagaagtcatgtgggtaaaaggaagcggttcggatttggcaacaatgaaagcgcataactttaccggtttgaaattagatgatatccgcccgctgattaaaagggaccaaatgccagatgaagaaatggtagactacctgtctcattgtatgatagacagcaaacatccccgcccttcaattgaaacgctattacacgcttttctgccatacaaacatgttgaccatacccatccagatgcgattatcagcatatgctgtgcggataatggaaaacaaatcgctgaagacatttacggaaatcggtttgtatgggtgccatacgtccgtcctggatttactttgtctaaaatgatcgctgaaggcgtagcaaacaatccccacgccgagcttatattaatggagaaacacggcttagtcacttggggagagacgtctgaaacatgttatcaaaaaacgatatccatcattcaagaagccgagcagtatgttaacgatcgtatcaatcagcatgaggtattcggaggcaaaaggtatcagccgctgccggaggataaaagaaaacaaatcttggcaggcatcatgcctgtgatcagaggagcagtaagtgaagaaaagaaaatgatcctttcctatgatgatcatgacgatgtcttggaatttgtaaacagtgtccaagcgccagcactttcgcaaatcggtgcggcatgcccggatcaccttgttcacacaaaacgggttccgctgtacattgattggaatccggaaactcaagatgtgcacaagcttgcagatctgatcaagtcaggagtcgagacctttacatcagagtatcaggcttactttacacgaaatcagcaggatggggatcaaatctttgaatcctccccacgggtgatattgattccgggaatcggaatggtgaatacaggaaaaagttatgcgatgtctaaagtaagcggggctttatatcggagggccatcgccgtgatgaaaggagcaaccgctctggggcaatttgtttctttacatgaaaatgaatcctaccatgtcgaatattggccgctcgaactatataaactcacgctggccccgccggaagcagaattttcccgaaaagtagcgttgataactggaggagccggcggaatcggcagtgcagcatgccgccgatttgcagctgagggagggcacgtgatcgtagctgatctgaatatagaaggcgcacagaaaattgccggggaaataaacgatgcatacggagaaggacgggcaatggctgtcaaaatggatgtgacaaaggaggaagacgtacaatcagcttttgaacgagcggcgcttgcttacggcggcattgatatcgtcgtcaataatgccgggctggccacatcaagcccatttgacgaaacaagtctaaaagaatggaatcttaatatgaatgttttaggaacaggctatttccttgtagcccgtgaagcgtttaaacagatgaaacaccaaaatagaggcggaagcatggtatttgtcggatcgaaaaattcggtttatgcgggcaaaaacgcctctgcctacagctcggttaaggcgcttgaaacccatttagcaagatgcatcgcagcagaaggcggagaattcggcattagggtcaactccgttttgcctgatgcggttcttcaaggatcggcaatctggggttcaagctggcgggaggaacgagccgcggcgtacgggattgaaccggatcagctggaggaacattaccggaaacggacagcattgctcgtcaatatttacccggaggatattgccgaagccattgcattcttcgcttcttccaaagccgaaaaaacaacgggctgcatgatcacggtagacggcggcgtccctgctgcttttacgcgttagaaatatgctatgataaaaatataagacggactacgatatgaggaagggcgttaccgatgctagtagcagaacggcagcaaaaaatagtggaaatagtaaataagcgttcaagcatccgcgtttccgaattaagtgacatattttcagtcacagaggaaaccattcggcgtgatcttgaaaagcttgaaaaagaacataaactgagccggagccacggaggagcggtcagtattcagcagaaggaatcagaaattcatttttctgaacgggaaatcacgaatgtcatcgaaaaaaaagccatcgctcacgaagcggccaaatatgtaaaaagcggagaccgaatcattctcgatgcaagcacaaccgcttggtacatggcaaaaatactccctgacattgagctcaccgtgattacaaactcaatgaaagcagctattgaactcagcaataaagaaaacatatcagtcatttcaacaggcggcattttgctggaaaaatcattatcgtttgccggcccgttagcagagcgttcactagagacctatcatgtcaataaaacctttctgtcatgtaagggatttgacgtacacaacgggatgagtgattcaaatgagtggcaggcgctgctcaaaaaacggatgattgaaagatcggaccagaccattttgatggccgattcaagcaaatgggggaaccgcgagttttcacatatagcctcgctgcaagatgtcagccgcctaattacggattctggacttgatccggcatcggtaaaagctcttgaggacaaaaaggtgaaggtgacagctgttcctctttcgaagagagggtgaaaggatgatttatactgccattgatataggcgcatcaagcgggagaatcatggtaggtgaactgaatgaagggaagcttgacatacaagagattcacaggttcgctaacggtttcagtcaaagagacgggcattgcttttgggatattgatcatttgctaaaacaaatcctgcaaggactgcaaaaagtaaagacgcttgggtatgaacactgcaccgtaggcattgatacatgggcagttgattatgtcttactggacgaaaaaggcgatcggttgcgggaagcaatctcctaccgtgatagaagaacagatcacacaatagacaaactggaacataccctctcaaaagccgcaatttatcaaaaaacaggaatacaatttcagcctttcaacacgatctatcaattgtatgaagaagaccgtgagctgctgaaaaagacagacaaaattatgatggttcctgattatttaggctattgtttaaccggaaaagcagtaacggaaatcacaaacgcgtccacaacacagcttttaaacgcctcaacgggaaatcttgatcctgaattgcttgaagccgtgtccgttcaggaacagcaatttgcgccgctgactgaaccggggtgtgagctcgggaagctaagaaatgagtggttcccggattatgatctcccggcgtgcaaggtgatgacagtcgcaacacatgatacggcctcggccatcattgcggcgccaggcgtaaatgatggctgggcgtatatcagcagcggaacatggtcgttaatcgggattgaaaacaaaacaccgataataactgatcttgctttagaaaacaactatacaaatgaacgcggcgcaaacaacaccattcgctttctcaaaaacattatcggcatgtgggtgatacaagaagtcagacagcagttacaagcagattactctttccagcagcttgcagaagaagccgaaaaaacagaaccattccagcaatttataaacttaaatgataaacgattcctgaatccagaaaacatgataaaggaaatacaacattattgcagacaaacccgccaaaagattccccgtactgcaggcgaacttgcctgctgcatctacagcaatttagccatcatctatgcgatagccatcaaagagctcgaaacaatcacagaaaaaccgatcgagcaatttcatatcatcggcggcggagcccggaatgatttcttaaatcaattaacggcagacatgagtggaaaagcggtatatgcagggccgatagaggcaactgccaccggaaatcttttgatgcaaatgattgctgccaaagaagtcaaagacataaaagaagcccggcaagtcgtcagaaattcctttccgatcaaagtgtttacacctaaagacattgacagaagcacgatcattcagtcatttcagcaaactgttttgaaagcgctatctaaatgatgaagaggtgaaaaagtttgaaaagaaaagccagtatcatgtttgtccatcaagacaagtacgaagaatacaaacagcggcatgatgacatttggcctgagatggcagaagcactcaaagctcatggagcacaccattattccatttttctagacgaggaaacaggcaggctttttgcatatttagaaatagaggatgaagagaaatggagaaagatggcggacacggaagtttgccgaagatggtggaaatcgatggcgccattaatgaaaacaaattcggatttcagtcctgtttcgatagatctaaaggaagttttttatttggattaaaaaactgataaagggagagagccgtatgaccataaaagccaattatgacagtgcaaaacaggcatatgaaaaatggggaattgatgttgaagaggcgcttcggcaattagagcaagtgcccatttcgatccactgctggcagggtgacgacattggaggctttgaagtaaataagggcgagctttcaggcggaattgacgtgaccggcaattatcccggaaaagcgcaaactcctgaagaattaagaaaagatttggagaaggctctttctctcattcctggaaagcaccgcgtaaacctgcatgcgatatacgcagaaacaaacagggaagcggtagaacgtgacgaattgaagccgcagcattttgaaaactgggtgaaatgggcaaaaaaccttggtctcggtttagattttaatccaaccttgttttcgcatgagaaagcggctgacggactcaccctttcacaccctaatccggacatcagagaattttggatcaggcattgcatcgcttgccgccgtatcggggaatacttcgggaaagaattaggaacaccttgcttgacgaatatttggattcccgacggctataaggatatcccgagtgataggctgacaccgcgtaaaagactaaaagaatcactggatcggatcttctcagaagagatcagtgaacaacataatcttgattcaatcgagagcaagctgttcgggcttggctccgaatcatatgttgtcggatctcatgaattttatttagcttatgctttgacgaatcataagctttgtttacttgatacaggccatttccatccgactgagacggtatcgaacaaaatctcgtccatgctgctttacacagacaagcttgccttgcacgtatcgcggcctgttcgttgggatagcgaccatgtagtggttttggatgatgaattgagagaaatcgctcttgaaattgtacgaaatcatgctcttgagaaggtcgccatcggtctggattttttcgatgccagcattaaccgtgtagccgcctggaccatcggaacgagaaatatgatcaaagctttattgtatgccttgcttctcccgaacggatatttaaaacaattgcaggaagagggccgctatacagaaaggctggccctgatggaggaattcaaaacatatcctttcggagccatctgggattcctactgtgagcaaatgggcgttccggtaaaagaggcatggcttcatgacatcaaagaatatgagcaacaggtgcttttaaaaaggaaggcatcttctccgattgtctaataaaaaatccgccgcggcatttgcgcgcgtgcggatttttttaagcttgatcagcagggtatacaatccccatttgctttcttgcttcttccataattttcgcggtggtcaaagaccgttcaaatgtattttcttcagattccagcttattctcttttatgagcgtgacaaattcttctgcttcatagaacatcgctggtttaggatcagggatcgcgatgttttcaaggcggccgtcccggtagcggatttcaacacgttcaggccggtgaatcgtatcgattacaatcgtcccgtcttcaccctggatttcagccggggcataggaagtagagattttggaatgcatcagaacagcttcgaacccgtcgtaagacagaatgacagttccttctccgtccactccggaggataaagcatatccgtttgcttttacatccttcggcgcgccaaacaacacaacagccggataaatacaatagacgccaatatccattaatgacccattggaaagctcaggctgaaacgcattcaaaacagttccgcttctgaacgcgtcataccgtgaggaatactggcagtagcttgcggtaaatctgcggacagtgccgattttatgcaggtgttttttcagctctttgaaattcggcaggaaagtggtcttcattgcttccatgagaacaacgccgtttgccttagccgctgagatcatctcttctgtttcttttgtattcgaagcaaatggcttctcacaaagcacatgcttgccatggttcataaagagaacggcttgttccttgtgaagagcgttcgggctcgctatgtatacggcatcaaagcaatcgctcgccgccatttcctgaaggtctgagaaggcatgcgcagcgttgtgtttagcagcaaactcgccagcgcgttcagccgatcttgaataaacagcagtcagctgaaaatcttcgatatccgctgctgactcaagaaagcggtctgtaatccagttggttcctattattgcaaaacgtatcactcgtatcgctccttttgtatgatatagctaaattatagcttaaaaagaacaaaatcacatgatagatataaatagaatgttaaaaccgtgaaagcttttccagcaattaacggtttttatttttcattatagggacgatagtgtacaatttaattaaactatgtatgacggaggaacgatagtggagacgttgcaaacatggagcggcagattcaagcgattcttcttggataataagtttgttttatttttgcttgtgctgctgctgattggtttaaatattctagtatttacaaaaacatcatttattttcaccccgattattgttttgctcaaaacgatatcacttccgattattttgacaggcattgttttttatctgttaaacccggtcgtcgatttccttgagagaagaagaataagaagaatctattctatattgctgctatatctattggttatcgggctgatcacgatcacaatcgtgtcgatcattcccttcttaaaagaacaaattatgagtttaatcgacaacatcccaagatatgtggatatcgttgaaaatcagacgaaacagctgatcggcagcaacttcgtcaatcaggcccagcaaacgacgaacatcaatatatctgatctcgcaacaaaggtttcagatcaggcagcgacaattgtgaacagtacctttaccggcgttgggaattttatcggcgccctgactgagattatcatttcaatcgttacggttccgtttatccttttctatttgttaaaggacggaaaaaaattgccggtctacatactgaagtttgttccgacgcaattgaaagaacagacatacacagtcttaagcgaaatgaatcatcggttaagctcttatatcagaggccagatcattgtcagcttctgtatcgggtttttgctgtttatcggttatttgattatcgggctggattatgcttcattgcttgcagtcattgcggcttgcacaagcatcgttccatatttagggccaacgattgccattacgcctgcgattatcattgccatagtgacatcgccgctcatgctgcttaagctggtgatcgtttggacgattgttcagctgattgaagggaagctgatctctccgcaaattatgggaaaaaaccttcacatccatccgattacgattatttttctgctgttaacagccggcaagctgttcggcgttgttggaatcattcttgcgattcccggctatgcggttgccaaagtcattacgacacatttatttgactggtttaaaatgcggtcacatttatacgatgaagaaaaaaatgaaaatacgccggggcataaagtgtgattttcgtttatagttatataagacgggctttccatttatgggaagctcccgttatgtaaaaaaataaatgtctaatggggagaatcaaaatcatgactctatgggaattgtttgtagccgccattttaggaatcgtagaaggattaacagagtacgcgccggtttcttcgacaggacatatgattatagtagacgacatctggcttaaatcaagtaatctgatgtcagaagaagctgctaactcattcaaggtggttattcagctaggctccattttagcagtagctatcgtgtttaaagaccgaattttaaatttactgggcttgaaaaaaaatattacaagcgaccaggagcagggacataaattaagcattgcccaaattgccgtcggactcgtgcctgcagctgttctcggctttttgtttgaagattacattgatgaatatttattttccgttaaaactgtggccatcggtttaattgccggggcaatcctcatgctttttgctgactgggtcaataaacggaaaacagcgacagacacactcgaccgcatttcctataaacaggcgatagccgtcggcttattccaatgtcttgccctttggccgggtttctcgcgttcgggttcaaccatttccggcggtgttattctcggattaaaccaccgagctgcagccgactttacgtttattatggcgatgccgatcatgatgggagccagctttctaagcctcgtgaagcattgggacagcttaagctcggatctgatgccatttttcatcgtcggctttatctgtgcctttgttgtcgcactgtttgtcgtccgtttcttcttaaggctgattaacaaaatcaaacttgtcccatttgcaatctatcgaattattctcggtgtgattttacttttgatcatgatgtaagtcgaaaataaggctcttttacgagccttattttttctgtcaattcaagaggaaacagcttgtttttcaaaataaaatcatctataataaacatgacattacatacggggccatagctcagctgggagagcgctacgctggcagcgtagaggtcaggggttcgagcccccttggctccatacctgtaaacccttattctataagggtttttttgttttgaggaaaagattcattctctgaatcctccagttgagcgaagtcaaagtgagcagtttatctgtcaatcatgaattttccaatacctccttttgttcctcaaagaccgtcatgtcttccaaaggaggggagtagacatgaagagacaccattcgttcggatgttggattggacattttgtgaattaaacctttggttgaaataaggcattctccttcgtggacaaagtatgaattggagagttctgcgtgttcgccggttgaacgataaatagaattaagaagctttccttctaacaccattgcacaaccaatggattgaccatgatcgtgtactgttgtctccttgtttggcggaatgttaatcacgataatttctaattcattatttcgatagatggcatttcggccgtaagcgtactggtctggttccttaatatacggttgactcaattttgctgcgtttggaatttgttttaaagacgttgctaaatctttaaccgatggatttttcaagccgccaaaaatgtcttggatacactcatacagttccattcgtttttgcctcccggaatatttagaatttccttacattggtatttcataggttaattcatggtatttacccatatacaatttagaggcggcaaacgcccagtgaacacaaaaaaatgtgggggcaaaatgttgtcttatcaccaacttatttgagtttattagttggaatagtggattgaaaggattaaaacggcctgctttaattcgcttgagggaacgagcagggattcataagtgcagttctagacacaatatcggggaaaagctttcaagatttctatgttgtgcttgaaatttactccattgacaaaacacaatcgatttgaaataatatttgattatatgctcattcattcacataattatattaaaataatatcatttcccctgaaagggagaatattagaatgaaagctaatggtatgcaaaatctattagcttcttttgttttcaaaaaatgatgtgtttcgcatgtattcatataggaaggaatgacaacatgaagacaaaacactattgggtgatttctttgctcgccgtcttagcggtcgggccgggattgatgtctaacacggcattgtcgtcagttcaaggccttgttcagaaagcggttggaacaagtgtcttcacatcagtaaatccgatattgatcggcaatatggcctttgccttgttagttccggcaggaccgttgctgaggaaaaaattcggtgctcgtcccgtctatctggcttcattacctgtttttatactaggctcactgctcatcgcatgttcaggcgatattgcatggatggcggcagggcgctttttacagggagcggcaacaggcgtcatgctgatgattatgattccaatgcttgtactgtcattcccgattgaacgcaggaactatgcactgcttgtgctgatcgggggattctatggttctgttatcatcggcacaatcctcggaaccattgcaacaagctgcgggcattggagatggctgtttttcatctttggcaccttgtccctgatcggtgtcgcggtgagctatttctttcttcatgacgagcatcacggagcgtcggatcaagaacagccgcttgatcgtgcgggaattcttttatctgttttccttgccgcagcctcagcggtttcattcatttttctgcaaaaatgggggctgtcatcgggttatgtatggattggtttcggggtgacgttatgtttgctcattggtctattgattgtggaatataaagtgaaaaacccattcatatctattaaactgatgctgctgccaaaaccggtgcttggcttattgatcatagctgcagggacgataacggtagctgtcagcctgtctgcttttcaaggcttgctccgtcaaatgtatgatatttctcaggagcatctcatatttttaaacttgactcttttaatcggagtggcgatcgcggccattttaagcgctctgttatacgataaagtcggaccagggatgctcggtattatcggcggactcattctcgtctttgtgaattttcaatggctgcatatgcaggatcgatcatctctttatatgttcgcggcactgtttatcatgcttgcagcgggaacaggcctgacagtcgccgcagggctgatgggagctgccatgggaggcccgctgcctgatttggtcaagagaatgacagctgttcagtttttaagattgtttgtctatatgggagttcctattctcatcggctttttcacgaaaaaagatgctgccagacaaagcggttcggtacaggattctatgatgactgcttatcatgatctcttcttcatttcttttatccttagcgtgctgctcgtctgcctgtcattttgtatgaatgccactggaatggggcacaagctggcacataaaccacatgataaagcgaaagcagctccggaaaaaccggccgtttcagcagaaggtttgtcgaaggcaactgtcaaatcatataaagtaataaatgatacggaatatcgtaatgcactcagaaatttacaaaaatagaaacatggtaaaaaccttttcattgagcgaaaaggtttttattttgcaatcttttcccaactttatccctaaagaattgaaaaatattagaagtgcaagtaaaattctaaaaggtagattcttttacattcgtaatcttttaattcgaaggaaggttttcatggcccgtaaaaaacttaaaaaacgtaaactcttgatttcactatttttccttgtatcgattccgctagctctgtttgttttagcgacaactttatcaaaaccgattgaaatatccaaagaaactgaagaaatcgatgaacagcaagtatttatagacagtctgtccggacatgcccaaattttgtatgaaaaataccatgttctccccagcatcacaattgctcaggccattctcgaatcggactgggggaacagtgaactggctgctaaggccaacaacctttttggcgtaaaagggaattataaaggccatcatgtcacgatggaaacggacgaagttgaaaaagggaaaagaaaaaccattcgcgcgaagtttcgaaaatacagcacgttttttgaatctatggatgatcacgcccaattgttcgtccgtggcacatcgtggaataaaaagaagtataaaccggtgcttgaggcagggaattataaggaagcggcaaccgccctgcaaacatcaggatatgctacagatcctgactacgctgacaaaatcagcgctattgtggaaaaatacgatttagatgagtacgatgaggtaaatccatccctcaaatctgtggatttaaacgcctctattaaagacagtgccgttcaagacgtatggtccaagccctctactgatgatcggtccataaggcttacctctgcccaatcttacgtcggcaaagacataaaggttgtgtctaaaaaacagaaaggccagtctgtttggtaccaattccaaatcaatgataaacttattggctggattgatgattcagctgttgaaataaaggaggcaacctaagccctttttactggtatttttaattctttgttccattccggggaatttgaggtataatattccacggaagttatcactttttaactatgctttcgggagggaacaaaggtgcagaaatatagacgcagaaacacggttgcctttacagtattagcttattttactttttttgcgggagtatttttgtttagtatcggactctataatgctgataatctggaactcaatgaaaaaggttattacatcgctgttatgatacttgtagcagttggtgcgattcttacacaaaaagtaacccgtgataacgcggaggataacgaaatcatcgcggaacaggaaaaaagacaaaatcaatctcatatcgaatcataaaaaaatccggcgactgtacgccggattttttgatatcaccctgtaaacacttcgccatcagggtaacggatatttgattgctctgtttttgcgaatgaaaacacgaacgttaaaggaccaattcttccgataaacatgatgacaataatgatacacttgccagctgttgtcagttcaggagtaagccccatcgtaaggccaacagttccgaatgcggaaaaggtttcaaacacaatttgaagaaatggcgcttgttctgtgatcgtcagggcgaaaatccctaaaaacacgatgaacaaactggtgacgctcacagctaaagctttaatgataatcggatatttgatggaacggcggaaaataaccgtttcttttttacctctcaagtaagcaataacagatgttaaaatcacgatgaacgtagtcagcttaatgccgctcgccgttgatgcgcttcctgctccgataaacatcaataataaagtaaatacaattgttccttctctcatgcttccaaaatctagagaattgaagcctgcggttctcggcgtcactgcctgaaaataggacgcccacagtttatccactatatgcaggtggccgagcgtgccggggttgctgtattctaaaataaagaccgttagcatagcaatcgcattcaacatcagcgttcctgtaagcatgagctttgtatgtaaagaaaaagctttaaaacgccgatttttcatcacatcaaacagaaccgtaaatccgatccctcctgtaataaataagaaagtaatcacgaggtttactgtaggatcgccaacgtagctcatcaaattatcaggccacagcgaaaacccggcattgttaaaagcagaaattgcgtgaaacaaacttgcaaacaagccggatgaccagccgtactgaggtacaagccggatggataaaatgagtgctgctatcaattcaatactgatcgaaaacagaaacaggactttgacaaggccaatgacaccgccgattgtcggctggtttaaggcttcctggacgagcattcgttcttttaagccgattttttttcctaatatcatgacgatcaagaccgcaaatgtcataaatccaagcccgccaatctgaatcagccccataataactgtttgcccgaataccgtaaattgagtaccggtatcgacaacagcaagccctgtaacagttgtagcggaagccgcagtaaaaagagcatctatccatgacaatggcttcgtagtggaaatcggaagcattaataggacagccccgatgataatggtaaggaaaaaaccaatggcaagcacttgaggcggtgtaaaccgaacccatttgatcactttatccttttgaagtgtcacctttgtctacatcccttcgttttcaaaacgtttaatatcctttttgtggcccatgatcaccaggcaatcttgctcgtgaatgatgtcttcaggcgcgggggaaagacagatatctccatgatgtttaatggccaggatcgtgcagccgtactttgctcttacattcaggtcaataatcgattttgaatcaagcttgcgcgtagccagcagctcgacaatactgtattcatcagatagatcaatgtaattcaaaacattttcgtctgaaaggctttgtgcgattttaacccccatatctttttcaggatgaataatgcggtcagcgccgattttttcaagcaccttgtgatgataatagttttgagcctttacccaaatatttggaatatcaagctcctttaataatagggtggtcagcgtactcgcttgaatatttgctccgatggcaacaatcacatattcaaaattgcgtattcctaatgaaagcaattcgttttcttcggtggcgttggcaattaccgcatgagtggcgtaagaagcatatgcattgaccttttcttcgttgatatcaaccgcaaggacctcatgccccattctatgaagttctttacaaatgctgccgccaaaccggcccagcccgatcacggcaaattgcttatttttaattcttcccaatgttcatatctcccttagtgaattaacgtttttgaagcaaaaaagaccattgcaaagaatggccgataatagacctcctctctgtatacgcctacgaggttagctgtcggattagggattcagagtaccccctcttacttagtaagattcaccccaaggctgttaaaaaaacagccaatcgttggttcccccgttcgtgtttgattaagcggtaaaagagactgtatgaaattaaacactcaagaatttactcctgtttctagtgtttgtcaatttaaattttaaaccagaaaaaagataacgggaattagagaaaaaggggagggtaaaacgcaaaaaagaccggcgttaaccggtcttttacattagttgcaaccgcaaggctgagtcggaggagtgctgcgcttagccacgtcaatgctggcttctgcgtaaaatttatttccgatgcttaatgatttattctctgcacggaaagtatatgtacctgcggcaggaagtgttttgttattcagttttaatttgaattcgccagctcctaacaaatcaagtgccaaaggaactcttactgttttcccgttattgaggatctgtgttgtacgcaaggcatttccgttcaatgtgtctttcgtgtttgcagtaaatccgcttggcaatgtaaactccataacgccaaggctgagaagcgtgtttggacggtaagtcaattcgatatctgagaaagaccattccgttttgctggcgccagtgattgttgcgaacaatgaagctgtagactgtgttctcatagtagattcagtatgagctttagttgatgtagattcagccgcgaaagaagctgtaggtgcagaaacgagtaacccgagacttaatgcactaattgccaaagaagataataatttgcgtttcataacaaaattccccctaaaaaatgataaattaaacaggcctgcccgcttttcacctcctctgaaggccaaatacaaattttacctacataaaattaccatcaaatattttggaagtaaatggggtgtttttcccgtatttttcaaatttgtagtagttacatcaaaaaaacgcctggtttcccaggcgttttctgctttactttgtttcgaccggtataaatttaaaaatttctccggtctgcaccgattcagcaagccgtttcagccagtcatagtaagctttagagctttccagctgatcatataactgcagtgcttcatttttgatatcctcatcgagatcttccttgcttaaaaccttttgtaaatcagcttgtgcttcctcgatcgctgttacattcacttgaacctcccgctcccatttaggtggaaagaaatttgtgaaaaatttaaagaaatccttctcagccacaaatgtatgcttgcggatgccccggtgaaatgtttttttcactacatttaagtcttgaagctttttgacgccagtgctcatgcttggtttgctcatttgcaactcctcacgcatttcgtcaagcgtcatctcatccctcatatacatcgtcccatataaaatcccgacactgcgggtaattccgtaaagatccatcgtttcagcaatggagtcaataacaagatcccgagcctgttctatagctgcaaattctggattttcatccatactgaccctcttttcctttagaaaattaaattcgttaagttatttctttatgttctttatcttaacgaaacatgaggaaaagtcaaaaagaaaaatcaaaaggggactttgacagtttaaaaaccatatgttagattaaggttgttaaaaacattaaatttttatttaacaaactttatttacgtcaaggaggcttatatgagtcaaacattattcattgacggagaatggatcagtgccgaaaaagaacagatccgcagtattatcaacccatttaatcaagaagaaattgcaactgtaagcgagggagggcgagaggacgccatcaaagcaatcgcagccgcacgcagagcatttgacaaaggagaatggtcttcgctatccgggcttgaacgcgggaagattgttctgaaaattgcggaattaatcagacgcgatcttgaggagttggctgagcttgaatctcttgatacaggaaaaacactcgaagaaagcaaggccgatatggacgatatcgccaatgtttttcaatattacgccggcttggcagacaaagatggcggagagatcatttcatctccgattcctgattcagaaagcaaaattattagggagccaatcggggtttgcggccagatcactccatggaattatccgctccttcaagcgagctggaaaatcgcccctgcactggctgcaggaaacacaatcgtcatgaagccgagtgagattacgccgctgacgacaatcaaagtctttaagctgatggaagaagccggtgttccaaaaggtgtcgcaaatcttgttcttggaccgggagccacagtgggcgacgagcttgccgtaaacaaagacgtcgatttgatttcatttacgggcggaattgaaacaggcaaaaaaatcatgcgggcggcaagcggaaacgtcaaaaaaatcgcccttgaacttggcgggaaaaacccaaatattgttttcaaggacgcggatttagaagttgcggttgatcaggccttaaacgctgtatttttccacgccggccaagtatgctctgcaggttcccgcttgcttgttgaggatgccattcatgatcaatttttggcggagctggtcaaacgggcaaaacgcataaaactcggaaacggttttcatgctgagacagaaagcggtccgcttatttcggcggagcacagggcaaaggtagaaaaatatgtagagatcggaatagaggaaggcgcgaagctggagacaggaggcaaacgcccggaagatcctgagcttcaaaacggctttttctatgaacctactattttctcaaactgtaattctgacatgagaatcgttcaggaagaggttttcggtcctgtattgacagtcgaaaccttcagctctgaagaagaggtaatcgagcttgcgaatgataccatctatggcttggctggagcggtatggtcaaaagacattgaaaagtgcgaacgggtagctgcccgcttgagaatgggaaccgtttggatcaacgattttcatccgtactttgcacaagcgccatggggcggatataagcaatccgggttcggacgcgagcttggaaaaataggccttgaagaatacacagaagtcaaacatgtataccgcaatacaaaaccggcagcggttaactggttcaattcataagagggggagattgatgatgacattaaatatgaaggtagaaagcatgcagaaattccacacatttgaaattccgactgtgattaagcatggaatcggagccatcaagcatacgggtgaggaagtagctgcactgggcgtttcaaaagcgctccttgtcacagacccagggatttataaagccggtgttgctgatcctgtaatcgaatcacttaaagaagcaggcattgaagtggtgctctttaataaagttgagccaaacccgcctgtccgtctggtgaatgaaggatctgagctttacaaaaaagagaactgtaatggtttggtggcagtcggaggcggaagctccatggatacagcaaaagcaatcggagtagaagcgactcacgaaggaagcgtgcttgattatgaagcggcagatgggaaaaaaacgctggaaaaccgcattcctccgctgacgacaattcccactacagctggaacaggatcagaagtaacccaatgggcggttatcacagatgaagaaagagaattcaaattcaacacgggcggtccgctgattgcagcgcacttgaccatcattgatcctgagcttcatgtttcaatgcctccgcatgtaacagctatgacgggaattgatgcgctcgcccatgccattgagtgctatacaatgaaatttgcacagccaatcacggatgcggttgccttaatggcgattgagtatgccgctcattacattaagagggcatttgctgacggagaggatctggaagcaaggtacggaatggcgcaggctgcgatgcttgccggcctttcttacggaagtgaatcagcgggcgcggctcatgcgatgagccaaacgcttggcggtattatcccagtcgctcacggccaatgtgtagcggcgatgatgggccctgtcatggaatacaactggaagggctatcctgagaagtttgcgcgtattgcgaaagcgttcggtattgatacaagcaagatgacaacagaagaagctgcgaaagcatctgtcaattggatgtatgatctggtcgaagatttagaagtgccgactttagaagagcagggagtatcacctgatatgatcgaacgcttgtctaaagaagcaatgaaagatccgcaaaccttcggaaaccctagagatttaaatgaaaaagcatacaactggatctacaagcgctgctttaaccttacgcctaaaacggtataatcaaaatcccgctcctttacagagcgggattttttgggataatgaagcataggcggaaattttagataagaaggaaggtgccagctgatgtggaagcgtatgactgcaaaagcggaaggcttatatatcgcagatacagaaagcttcgtaacaaagcaaatggacaagcttgattttgattatggcggcatccccggcgacttgcattttggcctgaccaaaaaagcgggagccagagaaccaatgttttcaagagggactgaaattttcaaccgcagacaaatttcaattgtttcaatagaggaatgcaacgaaatcgctttaaaaatgggagtgccgagaattttgccggaatggctcggggcgaatgtggcagtcagcggtatgccagatcttacttcattaaaagaaggaagccggattatttttccgagcggagcggctctgctgtgtgagggcgaaaatgatccgtgtatccagccgggagaagtcattcagtcttattatccggaccaaccgaagctggcgccggctttcgtccgccacgcactgggcattagagggattgtctgtattgtggagagacctggtgctgtttacacaggtgatgaaatagaagttcattcctatcagcgaaaagtcaaacgaaaagcagaaagggtctgatgaaatcaggccctttctatcttttctttaatttctttcatttggctgagatgccgtttttcatgatggccgataaaatcgatccactgtctgacagtcagctcttgaaacacaggatgcggaagcactctttcaaaatcttcttctttcagagaggcaatcgcagcagtcagctgctctcttaccacatcaagctcacgtttcatttggctgcctgaaataaaatcatgcgcaggctcaagatgactcggggctttccgtttattatttctgtcctgtgcgacctcaagcggtttttcttcaatttctttaatcggagcgtcctttacacgttccttcaacattttttgtgcggtcatatcgatttttttcaaatggtcaagaacttcccgtatgctccattcttcagcagaaggcttttgattcagcttttcgtcagaaagtcctttcaattcgttccacgtttctaatctggcttcattaaagatactcatcatatctcctcctaaaatgacattaccatatatataagcaattatcatttataaagcacttcaaatgggttatttgtcttaaaattttgaaacttttcccgtggtgtctcgtataaatggtaacggcagccgttcatcaatgcattgatgaagaaaggatgaggaaattggagttatttggagtacctatacaaacaatttatctttatacgcttattattgcgggcagccttacgctgttatttctgtttttcggagatgtatttgcagggctgccagaaggcattccgtttcttaatccgacattagtgctctcatttttcacatgtttttcagcgggcggatatataggtgaactcgtattgcctctgccaagcttgctgattgcgcttttatcttgcatcctttcaatcatgctggtggtattgcttcacatctttgtactggtaccattatcatctgcagaagaatcattggcatatagagaagatgatctcagaggaagactcggtaaagtgattacagctgttccggttgacgggtttggtgaagtggtcatagaagggataggcgggaccatttcaaagtcagcggtcagttttgataatcagcagatcagttacgggacaacggtgttagtcgtagatattaacaacggagttctttcggttactccgcatgaacccatttaacataaaaggaggaatttgatatgacaatgccgattataatgatcatcggagttgtattctttttattaattgcactaatagctgtgtttattacgaaatatcgtacagcagggcctgatgaagcgttaattgtaacagggagctatctgggtaataaaaatgttcatgtcgatgaaggcggcaaccgtattaaaatcgtccgcggcggaggaacctttgtccttcccgtcttccagcaggcagagccgctaagcttattatcaagcaaactcgatgtttcgacacctgaagtctatacagaacaaggagtgccagtaatggccgatggaactgcaattattaaaatcggcggttctataggagaaatcgcaacagcagccgaacaatttttagggaaatcaaaagacgaccgtgagcaggaagcgcgggaggttttagaaggccaccttcgttccattctcggctcaatgacagttgaagaaatctataaaaacagggagaaattttctcaagaagtgcagcgtgtcgcttcacaggacctcgcgaaaatggggcttgtgattgtttcctttaccattaaagatgtgcgtgataaaaacggttatcttgaatcattagggaaaccgagaattgcccaagtaaaacgcgatgctgatatcgcaacagcagaggctgataaagaaacccgaattaagcgggcagaagccgataaagacgcaaaaaaatcagaacttgaacgggcgacggaaatcgctgaagctgaaaaaatcaatcagctcaaaatggctgaattccgcagagaacaagatacggcaaaagcgaatgccgaccaggcatatgatttagagactgccagagcgcgccagcaagtcacagagcaggaaatgcaggttaaaattatcgaacgccaaaaacaaatagaactagaagaaaaagaaattcttcgccgtgaacgtcaatacgactcagaggtaaagaaaaaagccgatgcagaccgttattctgttgagcagtccgcagcagctgagaaagccaaacagctcgcggaagccgatgccaagaagtacagtatagaagcaatggcaaaggctgaggcggaaaaagtaagaattgacgggctagcaaaagcagaagcggaaaaagcgaaaggagagacagaagcagaggttatccgcctgaaaggtcttgcagaagcggaagcaaaagagaaaattgcggccgcctttgaacagtacgggcaggcggcgattttcgatatgattgtcaaaatgcttccggaatacgcgaaacaagcagcggcacctctttcaaatattgataaaatcaccgttgtcgatacaggaggaagcggtgaatcaagcggagcaaacaaagtaaccagctatgcgacgaacttaatgtcaagtctgcaagaaagtttaaaagcatcctcaggaattgatgtaaaagaaatgcttgagaacttttcaggaaaaggaaacgtaaaacaaagcattaatgaattaacaaatgaaatcaaagaagccaaaacgatccaaaaatcagagtaaggaaagggcagaaccgtatggtaactgtacgtgaagcgaagttagaggatataaaggacattgcaaaagtgcatgtagacagctggaggacaacataccacgaaattatcccgattgattatttaaacagcctgaactataaggaatttgaagacaaatggaaaagtcgctcgttaaagggagtatttgttgctcaggacgaaaagggttcagtattcggctttgcttcatttggacctattcgctctgaacaagaaggttatgacggcgagttatacgctatttatcttctggaagagcgccagcggcaaggtgcaggcagggcgctcttagcaaaaggagcggagtttttgcttcaacatggtttttcaagtatgtttgtttgggttattgagcagaatccctcgattatattttatcaggcctattcacctgaaagagtagcggaggacaactttgaaattgccggagtaaggctgaaagaagtaggtcttggctggccggatctttcagctttaaaaacacttcttaacagataacgaaaaatcccccagcggaattcgctgggggattgttacttttacgctttgtcacttttaagcaaacggggtgctgtcataaataataaacataggacaattgcacaaataatgaatgaaggaaccatgtaagtcgcattataagttaaagaataaatccataccggtgttccttttggagcaaagctgccgaaaaacacagctcctgaaatgacatgcgcggcatagcgcagcaaactgccgataaaaactgcgctgaccactgaaacaatcaatttcccttttgtttttgatacagcggctttacggacagaagaagcgaaacagccgcttatgccgattgctgcgaaagcgacaatgtaatctaacaatagctgtacaggatgttgagcaaacaagtttccgattgctatttgtactagacctgtcaacaaacctgtagtaagacctgctttgacaccccagcgaaacgaaattaaaaagatcggaatcatcatgatggagaccgagcctccttgaggcatgctaagaaacattcctgagacaatgtctaaaataacggctgccgctgtcataatggcaatttcaataaggcgaaccagttgcttagattgattcatatctatctccttccattgacagacaaccaaaaggacaacaaaaaagcagcacgcggaaggatgagaaaagttccacgcactgctttacgatctgcaattcatttgactttgccacatccctacgccagcgttaactaacaggttcaaagggtcagaacgaaaccgctcactctcagctttaatgctccccttgtggtcatcagtatttagttcgtttctactatacaagaaaacgaaaaaaacaacaagatcacatgactgatgtatatgttcttttaagaaagttatatgatacacatgctttagaaatcatggcgaggattatagtttatttgttttatagatttttttaaaaaactattgcaataaataaatacaggtgttatattattaaacgtcgctgatgcacagcggacacaaactagatgcttcaaaacaacttgaaaaaagttgttgacaaaaaagaagctgaatgttatattattaaagctgcttcattgagaagtaacgaaatgatctttgaaaactaaacaagacaaaacgtacctgttaattcattttttataaatcgcacagtgatgtgcgtagtcagtcaaactagggcctgcacgacgcaggtcacacaggtgtcgccgcaggatgttaagctcttcagcgccgatggtagtcggggctttccccctgtgagagtaggacgtcgccaagcattacttttatcatcgcggggtggagcagttcggtagctcgtcgggctcataacccgaaggtcgcaggttcaaatcctgcccccgcaaccaaatatatgattaaataaggagtgccctaagggtacaactaaaataatcttatacaaatatggtccggtagttcagttggttagaatgcctgcctgtcacgcaggaggtcgcgggttcgagtcccgtccggaccgccattaatgtaaacgaaacgatcatgttttcgttttttttgtgttttcttttactgtatcttctgcttggtgtcatagccaagctttctttatatcgggaacatcttggatattccagcaaaattcgataaactaggaagagcacatataggcatatgcaggggtgaaaggagattttggttcatggatgaatttgatttgatacatagcattactccgcggaccattcaccattcttccgttgatgtaggaataggtgatgatgcagcgctctacactgcgaaacacggcgttcaggaaattgtttgtgttgatactatggtagaagacgtgcacttcaaattacactattcctcacctgaagatatcgggtacaaggcgttagccgttaatataagtgatattgccgcgatgggaggcattccgaaattttatttggtatcacttgcggtaccttcaaaatggacggcatccgaaatcaaggcaatgtatgaaggaatgaatgaactggcgaaactatatcagatggatctgattggtggcgatacagtttctaccgctgacaaattagtcgttacagtcactgtgatcggtgaaattgaaaagggacgtgcctgtttgcgcagtctggcaagaccgaatgatgttgtgtttgtaactggtgaaatcggttcttctgcagcaggactttctttattattagaggagactcatcctcaagattcttctattgacacggattactttatcaataggcataaacagcctgagccaagagtaagcgtcggcagattatgctcgagttttaaacgggcagctttaaatgatgttagtgacggattggctagtgaactgaacgagattgcagaagccagctgtgtttcaattgaaattgatgaaagcatgcttccaattcattctgatttacctaagcttcatcctaactggaaaggatgggctttgtttggcggtgaggattttgagctgacagggacggtttcaaaagaggagtgggaagtgttgaagcagcagtgcgcagcacgtcaacttcccattacaaagattggccatgtcagggaaaaaacaaaatctaaagtgatcctaaaaacagatcaaacatcaatgatcttagagaaaaagggatataatcattttaaataagacgggtgactcgtgtgaagcaattaaaatggagaactgtaaatccagaagaaacaaaagcaattgccaagcttgcggcagcgtttgctaaaccgggagacgtcctgacattagagggcgatttaggtgcaggaaaaacgacttttacgaaaggttttgcagaagggctgggaattacacgtgttgtaaacagtccgacttttacaattataaaagaatataacgatggcgtacttcctctttatcatatggatgtgtatagaatggaagatgaaagtgaagatttgggacttgatgaatattttcacggacaaggtgtctgtctcgttgaatgggctcatttaattgaagaacagctgccgcaggagcgactgcaaattgtcatcaaaagagctggtgatgatgagcgggaaattacctttactgctgtcgggaatcggtatgaaatgctttgtgaggagttaagtagacatgacaatattagcaattgatacatcaaattatacattgggcattgcgctgcttcgagaagacactattatagcagaatacattacatatctgaaaaagaaccactctgtaagagcgatgcctgccgttcattcattgctgaatgattgtgatatggcaccgcaggacctttctaaaattgtcgttgcaaaaggccctggttcatacacaggagtaagaataggtgtgacgttggccaaaacacttgcctggtctttagacattccaataagtgctgtatcaagtcttgagacgcttgcggcaaatggccggcattttgacggtctgatcagcccaatctttgatgctagacggggacaggtgtacacaggtctgtatcaatataaaaatggacttttagagcaagctgttccagatcaaaatgtgatgctggcagattggctggagatgctaaaagaaaaggatcgccctgttttgtttttaggtcacgacacttctattcacaagcagatgataaaggatgttcttagaacaaaaggattcattggaactgctgcccagcataacccgcgtccttcagaattggcttttctcgggaaggaaaaggtagcagctgatgttcatgggcttgtcccggattacttgcggctggcagaagctgaagcgaaatggattgaaagtcaaaagtagggtgataggatgaaaacaaaagcagcggtcagaaatatgcggcttgaagatatagatcacgtatacgaaatcgaagcatcctcctttacgtctccttggacgaaggattcgttttatcatgagctgctggaaaatccatatgctcattatctcgtgattgaaaaggacggccatgttgttgggtattgcgggatttggattgtgatggatgatgcccagattacaaatatagcgataaaaccagagtatcgcggccagtctttaggagaaacgctttttcgctcagctgttgaactgtgcaaagaaaaagacgcaaggcggctttcgcttgaagtgagggtttcgaatcatcctgctcaaggcttatataagaaattcgggatgcagcccggcggaataagaaagaactattatactgataacggggaagatgcgttaattatgtgggtgacgataaatgagtgagcaaaaagacatgtacgtattaggaattgaaacaagctgtgatgagactgctgcagctattgtgaaaaacgggaaagagatcatttcaaacgtagtagcctctcaaattgaaagccataagcgcttcggaggcgttgtgccggaaattgcttcaagacatcatgttgaacaaatcactttggttatagaagaggcgtttcgcaaagctggcatgacgtatagtgatattgatgcgattgcagtaacagaaggtccgggactggtgggagcgcttcttatcggagtgaatgccgctaaagcattgagctttgcccataacattccgttagtaggcgttcatcatatagccggtcatatatacgcgaaccgtcttgtagaagacatcgtgttcccggcactggcattggtcgtttcaggaggccatacagaactagtttatatgaaggaacatggatcatttgaagtcattggggaaacccttgatgatgcggcaggagaagcttacgacaaagtggcgcggacgatgggattgccatatccgggtggaccgcaaattgacaagctagctgaaaaagggaatgacaatattccgcttcctcgcgcatggcttgaagaaggctcttacaacttcagctttagcggattgaagtctgcggtgatcaatacgcttcataatgcatcccaaaaagggcaagagattgctcccgaagatttgtctgccagtttccaaaatagtgtgatcgatgtcttggtcaccaaaacggcgcgcgcggcaaaggaatatgatgtcaaacaggtccttttagccggaggagtagctgcaaacagaggcctcagagctgcattagaaaaggaatttgcccagcatgaagggattacgcttgtcattcctccattagctttatgcacggataatgctgcgatgattgctgctgctggtacaattgcttttgaaaaaggaattcgcggtgcatatgatatgaatggccagcccggccttgaattgacttcttatcaaagtctcacgagataatagcgtgagactttttatatgtttgttattaacagataattcacaatttatccacatgtctgtgagtaattatagagatatagatggataaagggctgaagtcgctgttaataaagtggataaattcagaatattttgtggatattgtgtataaagcgcttactttgttttgcttattagggtatgttctgtggataaaaagcacctctaaaaagaggtgcttgacttttttaatcttcttctgtggatagttcttcccattcggacaaaagagattccagctcctgattgagcttctcattgtctgcatggatagcttgtactttttcatgatcctgatagacttcagggtcacatagcaattcatcattacggctgatgttttcttcaatggtttgaacagtggtttcaatttcttcaatccgacggagtcgttggcgctctttctttttccattctttttcttcctcgtaggaacgtttggagtcagacttcactgtagctggcgttttttcagtttcctcttgctgatttattttctccaattcaagctgctctgtttttttctctgtataataatcgtaatctcccagatactcctctatatggcttgaagaaagctccaatactcttgtggcgattctgttaataaaatatctgtcatgtgagacaaataacagtgtgcctggataatcaatcagcgcgttttcgagaacttctttgctgtctaaatccagatggttcgtcggttcatcaaggatgagaaagttggctttttgaagcatcagcttagctagagccaatcttgctttttcgcctccgctcagtgaatgaactggtttcagcacatcatctccggagaataagaaatttccgagacacgttctgatttctttttctgggagcccggggtactcgtcccacagctcatcaaggacacgtttagaggaagtcaactcagcctgttcctggtcataatagccgacactgacatttgagccgtaagaaattgttccctgatctggttttagggtgtctattaatgttttcagcaatgtcgatttacctattccgttagggccgacaagcgcagcgctttctcctcttgtgagcatgaatgacacttctgttaaaagcggcggctggttttcatagctgattgtgagatcctgaacacgaaggacttcatttccgctctgttttgtaatatcaaaatgaaagtttgcggatttttcgtcgccaagcggttttgacatgacatccattcgctcaagctgctttctgcggctttgcgctcttttggtggtagaggctctcgccagatttcgatctacgaaatcctgcagctttgcaatctcgtcctgctgcttttcatacattttcagatctttttcatactgcgcggctttttggtcgagataagcgctgtagttgccgtgatactttttgctttctgctcttgatacctcgtatacctggtttactactttgtccaaaaagtagcggtcatgcgaaacgatgagaatggcgcctgaatagccttgcaaataatgttcaagccaggtaagcgtatcaatatccagatggtttgtcggctcatcgagaatgagcaaatcaggctgtgttaacagaagcttacctaaagccagtcttgttttctggcctccgctgaggctttgaacctgtgtagaatcgtcaaaatggctgaagccgagaccatgcagcacagatctaacatccgcttcatattgatagccgcctttatctttgaattcctgctgaaggcggtcgtaggttttcatgatgctttctaattcacccggggcagctgccgccattttttcttccatagcccgcatttccttttccattgcttttaagtggtcaaaaacagtcagcagctcttcttttatggtaagcttagaatccaagccagtatgctgggcgagatatcccattgtaatatctttcggtttaataatttcgcccttctcatacgaaagctggcctgcgataattttaaggagcgtggattttccggcgccatttcttcctacaatggcgatgcgatcacgatttctgacttccagctttatattgtttaaaatagtatcagcaccaaacgatttggacagctgattaatttgtaagatcatcatattatttcacctctgctataataagttaagtgtagcttatgaaccagaagtcagcaaacaatacattggccatataagacatagagaagaaaatagtgtatgatctgtttaaggagcgttttaatatgaatggattttctcattttaatgaacagggcagagcccagatggtggatattagcgaaaaatcttcgactgtccgtactgcggcggctgtttcaagcgtacacatgaagaatgaggtgtacgagaaaatacagagtcatgatatcggcaaaggagatgtactggctgtcgcacaggtggcaggcattatggccgcaaagcaaacgtcgaatatcattccgatgtgccatccgctttcattgagcggggtagatatatcgtttgactggaaaataaaagaagcagaagttatacttcatataaaagcacaggtcaaaacgaaagggagtacaggtgtggaaatggaagcgctcacttctgcatcggtgtgcgctcttaccgtttacgatatgtgcaaggcccttgataaggggatggtcatcggccctactttcttgctggagaagacaggcgggaaaaacggtgactttaaaagagaactatccgagtataatttggaggaccaaaaatgaataaggatcaatcaaaaattccgcaggcgacggcgaaacggctgccgctttactatcgctttttaaagaatcttcatgcgtcaggaaaacagcgtgtatcatccgctgaacttagtgatgccgtaaaggttgattctgccacgattcggagggatttttcctattttggagctcttggcaaaaaaggatacggatataatgtggattatttgctgtcttttttccgaaaaacgcttgatcaggatgagatgacagacgtcatcttgattggtgtcgggaacttgggaacggcatttcttcactataatttcacaaaaaacaataacacaaaaatttctatggcttttgatataaatgagagtaaaataggaactgaggtaggcggcgtgcccgtctataaccttgatgaccttgaacaacacgtaaaagatgaatcagttgccattcttacagtgccagcagttgccgctcaatccattacagacagattggtcgcattaggaatcaagggaatccttaattttacgccggcccgtttgaatgtgccggaacacattcgaattcatcatatagatttagcagttgagcttcagtcactggtttattttttgaaacattactcagttttagaggaaatcgaatagagggaaaggaggagcccaaatatgccgatcggtcctggaagccttgctgttatcgcaatcgttgctctgattatcttcggtcccaaaaagctgcctgaattggggaaagcagcgggagacacacttcgtgaattcaaaaacgctactaaaggattaacgagtgatgaagaggaaaaaaagaaagaagatcagtaagttaggatgacacgaatgaaagtgaatcaaatgtcgctgctggagcatattgctgagcttcgaaaacggttgctgattgtagcgctggcgtttgtcgttttctttatagctggattttttttagcgaagccgattattgtgtatctgcaagaaacagatgaagcgaagcagcttacgcttaacgcgtttaacctgacagacccgctttatgtgtttatgcagtttgcgtttatcatcggcatagtcctgacctcgccggttattctttatcagctttgggcttttgtgagcccgggtctttatgagaaagagcgcaaagtaacgctcagctacattccgatctctattttgctgtttttagcgggcttatctttttcatattatattttatttccttttgttgttgattttatgaagcggatttctcaggacttgaatgtcaatcaggtgatcggaattaatgaatattttcattttcttctgcagctgacgattccgtttggactgctgttccaaatgccggtcatcctcatgtttttgaccaggctcggaattgtgacaccgatgttcttggcgaaaatcagaaagtatgcgtattttacgctgctggtgatcgcagccctgattacaccgcctgagcttctgtcccatatgatggtcacagtcccgcttttgattttatatgaaatcagtatccttatatcgaaggccgcttatcggaaagcacagaaaagcagttcagccgatcaggacgtgtcttccggacaataataaaaaatccatttctcatgcgagaaatggattttctttatttttggttctttttgattttaaatgaaaaggcgaacatcttaaaagaaatgctgatgttgtaagcggcgaacaccatcagcaggatggagtaaaatgaccacatgctgcctggcgagcttgcggcaagataagtaaagatgcaccctacggcaaagtagatcattccccaaactaccgggtttctcataaaaataatcctccaataatcaattgcatttgtgtgctctgctgttcaaggtaattccgaacaggctcaagctgcatgatgacgacgaatgtattcatcattaaatgggcgaaaatcggcacccatatccgttttgttctcgcatataaaaaggcaaaggtaaagcccattgctgtatatagaagaagatgcttcaaatcagcgtgaacaataccgaagataaccgagctgatcagtcctgcgaaaaagaaattcgttttttcgtacagcgcgccgaaaatgatttttctgaagatgatttcttctaatataggcccgacgatggaagaaacgataatcatgagcgggactgcctgaatgacatccagaatcgcttgtgtattttctgattctcttccgatgccaaaaacataatattcaatagagcctgctattccttgagagaaaagggcaatgaaaaaaccggctatcgcccaaaggatagaaagtccgattgagtccttctgtccgtttcgcagcgtttctttcggaacggttctcagaatgagcagaacaacaacgagacaggcgataaagctgataacggaccataatccttgtgcatgcagcatattttcatctgtaggctgtcctccggcataaccgaatttaaataacaagggaatcgcgattaatgcggaaaactgcatgatgatatatgtcaaaataataaaccaatactgttttctcaaatggtatgtactcctttgttaagtgggtttcgttcatctacagctattgtaacataatcggtacgggggtgaaaaagctaacggaaaagggagcggaaaagaatgatgtaagcgtgaaaaattttttatcttatcacttgaaattggaagggagattctttattataagaattgtgttagcactctttagtgctgagtgctaaaattacatattcatactattgaggaggttattacattgttaaagccattaggtgatcgcgttgtcattgaactcgtagaatctgaagaaaaaactgccagcggaattgtgttgccggattctgcaaaagaaaaaccgcaagaaggcaaaatcgtggcagctggttcaggtcgcgtgttagaaagcggagagcgcgttgctttagaagtaaaagagggcgaccgcattatcttctcaaaatacgcaggtactgaagtgaaatacgaaggtactgaatacttaatcttacgtgaaagcgacattttagctgttatcggctaattcttaaataaacaatacttaaaacatttgaggaggtcttgtaaacatggcaaaagaaattaagtttagtgaagaagctcgccgcgcaatgcttcgcggtgtcgatgcacttgctgatgctgttaaagtaactttaggaccaaaaggacgcaacgtggttctagagaaaaaattcggttctccgttaatcacaaatgacggtgtaacaatcgctaaagaaatcgagctagaagacgcgtttgaaaacatgggtgctaagcttgttgctgaagtagccagcaaaacaaacgacgttgccggtgacggtacaacaactgcaacagttcttgcgcaagcaatgatccgtgaaggccttaaaaacgtaacagcaggcgctaaccctgtaggcgtgcgtaaagggatggaacaagctgtagcggttgcgatcgaaaacttaaaagaaatttctaagccaatcgaaggcaaagagtctatcgctcaggttgctgcgatctctgctgctgatgaggaagtcggaagccttatcgctgaagcaatggagcgcgtaggaaacgacggcgttatcacaatcgaagagtctaaaggcttcacaactgagcttgaagttgttgaaggtatgcaattcgaccgcggatatgcgtctccttacatggtaactgactctgataagatggaagcggttcttgacaatccttacatcttaatcacagacaaaaaaatcacaaacattcaagaaatccttcctgtgcttgagcaggttgttcagcaaggcaaaccattgcttctgatcgcagaagacgttgaaggcgaagcacttgctacacttgttgtgaacaaacttcgcggcacattcaacgcagtggctgttaaagctcctggcttcggtgaccgccgtaaagcaatgcttgaagacatcgctgtccttactggcggagaagtcatcacagaagatcttggccttgacctgaaatctactcaaatcgctcaattgggacgcgcttctaaagttgtcgttactaaagaaaacacaacaatcgttgaaggcgctggcgaaacagacaaaatttctgcccgcgtgactcaaatccgcgctcaagtggaagaaacaacttctgaattcgacagagaaaaattacaagagcgtcttgctaaacttgctggcggcgtagctgtcatcaaagtcggcgctgcgactgaaactgaactgaaagagcgtaaacttcgcatcgaagacgccctgaactcaactcgcgcagctgttgaagaaggcatcgtatccggtggtggtacagcgcttgtaaacgtatataacaaagtcgctgcagttgaagctgaaggcgatgctcaaacaggtatcaacatcgtgcttcgcgcgcttgaagagccaatccgtcaaatcgcacataacgctggtcttgaaggatctgtcatcgttgagcgcctcaaaaacgaagaaatcggcgtaggcttcaacgctgcaactggcgaatgggtaaacatgatcgaaaaaggtatcgttgacccaacgaaagttacacgctcagctcttcaaaacgctgcgtctgtagctgcaatgttcttaacaactgaagccgttgtcgctgacaagccagaagaaaacgctggcggcggaatgcctgacatgggcggcatgggcggtatgggcggcatgatgtaaaaccgacaaaaaaaccttgatttacaaaggtttgtcggcaatggacgtcatttttgatgcccttttgatgccatttgtaaatttcgaggcttctcatgagttcaccgaacttgtgagaagcttcttttttctgtctttcgtagtttgattttttcagcactgttctatatcgattttcaatagttttgataatcccgatatgaactattcaattgaccaaaatacaaaattccacaggctcagattcctgtttacctttaacaaacggcttactgtaacttcagtaaaccgcacttctgttatgattataaaaagggtttaaaaattattcgtgcaaatcctctgttacttctctccctattgcagacaggagatggtatcctctcataagataaaaaagccccagttatctaaataaatagtgtcaccaacactcttagacgtttccccaaggaaaacattgtcaaaagaaatcctattaaaatgtctatttgtgctgctttttagctactaagacgatgtatgtaaattcactggcgatgtagttaggttcttccaccaacatcttgataatattgatccctactcaatggagaccgacattccaattattaaatctaatattagttttttatgattaccaaggaggacttaatagtgcatttttcagaaatgatagatcgcttggctttatatgatttacacagaaaaagaagcaaagataaacatttttctgctgctattgcagccgatatcgatgatagagaggaattttacagtgcaaatatagctgatgtttcaattgacttgaatgaatctaaaaaaaattatagggttggaacattttgttatgaatccttaattcaaactgggaatcctgttaatgatactttaaaaggggaggtttttttaaataaaaatgatatagatcaacccaatgtcatctttgtacacggctggcgcatggattcgttcgatagaatcaaaaaaatatttcataaacgtataatgaacgatttaggctggaatatgtattattattctcttccataccattttgaaagagaaccggaaaattcactgtatagtggcgagttgatgattagtgcaaatattgatcgtacaattgagtcgacaagacaggccattgtcgatttacgggcattaattcactggataaaagcaaataaaaaaggccctgttatcatagtgggggtaagcttagggggatgggttactaatctaattgcaaccctagaatcccaaattgatgtagtggtatcaatcttttatgccaatcgcctttcttattcaatatggaacacgatcccaggtaaattcataagagaagaattagaacaaaatggtgtgacctatgaagatttaacaaaatattggaatatcacagatcctagtcaagccttgccgaaagttaataaagataacattctgctgatttctgctaaacatgatcagtatattgacttaaaagatgcagattatttatgggaaagctgggggaaacccacaagatatgtctacaattgtggtcattccggtattgttctttgtcgcaaaaagctggcaaatgatacgctttcctttataagagaaaggataaatacgggaaaacctggttcagtacatttgtagaccttaataagaaacgaaaggccaactgcaacttcagttggcctttcctatttattgagtgagagtgctgacagaactacgtactactcgttttctttagtcacccttgccaaaagttccacctctccccgaatcccaatcgcaggctcccacgaatcaatcaaacgaagcgccttctgattagcttccatcgctttcgttttctctcctttacggtacaacagctgcgccattccgtagtgatagtagatcagttcaacttgattggcgttatgtttgtcatagagcatttgctcaaaggcttcttccgctttttcaaactgatcacatttcacgtaagcgacacccagattgaaataggcttctatcgttttttcgccgccgtatgtggagctgatttcatttgccgcttcgtataattgaatggcttctacatgataacctctcgcaaagcttaagtcaccgcgaaccaatagaactctgtgttgaatggtaggggaaatcggttgattttcgatttcgtttaaaattgtctctgctttttcctgttgcccgtcttttaaaaacagccttgctttgagtgcatgtccccaaacctttagatcataggcatcgtgagcgtctgattgttcaagaatcttcagcccggcttctatttgctgaagcgctccgtctaaatcattgacttccatcaatgcccagcctgaggtgtcgattcggaagtacgcttctcgtgtgtgttggcctaagtgatgggcggcgtcggccgctttgcgtccgtattcgattcgcaggggcaggttgattctgcttagaaaatggctaatgcgggtgatgagttcgattaggatttctttttgttcagtttcacttgcccattggatgacctttaagatgtttggccattcttgtttcatttgatctaagttccgtcccagcaggtagctccaatagatagagttgggctgttcccgctttaaatgggtttcggcataatcaatataatagtgcgcccagcgattgcgggcttctttttcatattcgtgctgttcggacaagtgctgttctccgtaagcgacaacggtttggtgcgctaagtattgtgtcctgccttggcttcgttccggctgaatcagcgcatatgaccgcatttgttccatagcgtaatgaaaacggcgggcgtctaatccggctgctgccgccaggcttttttcatcaggcggcttgctgaaaaagcaaagcgtctgccagagctttcgcgtatcttcattgcatctatcccaggtgcggccaaagaggaattcaaacaattccagcagtgagtagcctgcttttccaagctcatgaatcagctgctgagcggggatgtcatcgtctgacatataggcaatgctgagtgccatggctttcgggtttccggcagtcgctgaaatgaattcgtttttcaggtcagatgatagatgtaacagctgctccagcttttcccgtttacgtgggaggttgcatgtttgtaagcagtgatgcacttcttgttgaaaaaattcgtgggcatctgtttggtcaagaccgcttagctgaatggctgtcatttctccgaagctttcccgataagtttgctttacgttttcccgcgctgtaaggagaacttttacgccttgcggaaggctggtgataaattcatgaatgtcacgttctgcagtatcaatgctgtcaacgatcagcaggatcggtttttctctagtgtaattggctaacgcattgcggacgacaaaccgttttacattgattgatttatcgatttgttctttgcgtccgagctgataggcgatcgtatttaaaaaatcgctaaagcttaatcctttccaatcagcgctgacccagatgatgctgttgaatgccggccaaactgaagtatcgtcgacacaggaataggcggcttcaagagcaattgtggtttttcccatgccggcccagccggtgattaaacagactggtgatggagaaagcatccattgccgtatcgcttccatatcaaagctgcgtccgataaagcgtccggaccagcgtgagggtaaattatgcgtgatgggctgttctgtaagcgcattcgtttcttggccgggtctgtcattaaacagccgttttactacattttcaatttcgccttcactcggagccccgaataatccgtcttttcgcagtattttcgcttttttcaaacaggatgctgcccatacaggcaatgcgggtttgatgactgggatagtggtggcttccagcaagtcggtcaaccactcgatatccaagtcggtcttttcgagaatgatccagatcattccgaacagttttccgtcgtcgattcttccgggaatgtagtttgcccccatctgtccgatccagcttttgatcgtgtttggggagactcccagctggagtgcgattttatctatgtaagactgtcctgttttttcattctttttccttctgactttataatcaggatgaagttttagcgttttgacgccaggtgccagcatttgtgcaaattgttttcggttttcaagttcagccataagcctgcacctcctattagtactattttatcaatccagcgttttttgtatatgaaaaaataaaagtacagtgccgctgtccttttatacagcaggaaaggctgttgaacgtgttaaaaagcagataaaatgggggcagtaacagagaaaacaaaaatgtatgcacttacattttattttctaaagaaaggaacttgccaaatgactcacacagtacctcaaaacatgaaagcggctgttatgcacaacacaagagagatcaaaattgaaacattgcctgtgcctgatatcaatcatgatgaagtgttgattaaggtgatggctgtcggaatttgcggatctgatctgcattactatacaaatggccgaataggcaactatgttgtggaaaaaccatttatccttgggcatgaatgtgcgggtgaaattgccgctgtcggatcatctgtcgatcaattcaaggtgggagaccgcgtcgctgtagagccgggtgttacgtgcggacgctgtgaggcgtgcaaagaaggacgctataatctttgcccggatgtacagtttttggctacaccgccggtagacggtgcgtttgtccaatatattaaaatgcgtcaggactttgtttttttaatcccagactcactttcttatgaagaagctgctttgatcgagccgttttctgtcggtatccatgcggcggccagaacgaagctacagcccggatcaacgattgcgattatggggatgggccctgttgggttaatggctgttgccgcagctaaagcatttggggcaggcacaatcattgtcaccgacttagagccgctgcggttagaagctgcgaaaaaaatgggagcgactcacattattaatatacgtgaacaggatgcacttgaagagattaaaacgatcacgaatgatagaggcgttgatgttgcttgggaaacagcagggaatccagcggcattgcaatccgcactggcttctgtgcgccggggcggaaaattggcgattgtcggtttgccttcacagaacgagattccgctcaacgtgccgtttattgcggataatgagattgatatttacgggatcttccgttatgccaatacgtatccaaagggaatcgaatttcttgcttcaggcattgtggacacgaagcatctagtaacggaccaatattcgctggagcagacgcaagatgcgatggagcgggcgcttcaatttaagaatgaatgtttaaaagtgatggtgtatccaaatcgctgagtgaacagggaggatcttcgtattctccctcttgtttactggaaatgaaaacggattcttggggtgggaaatgatgattggaacagaaaaagtaacggcattgaaggcgaagcatcagtcaaaatccagcaccggcctgtcctggtttgaacgaatcggttatggattcggcgatatgtcgtataatattatctttcagtttgtaaacgcatacttattattttattatacagacgtcggcggcattcagcctgcggtaatcgcaactttgtttcttgttgtgcgtgtgctggatgctatttttgacccgatcatgggattgattttagataaaacgaatacaaggtggggaaaagcaaggccatatttgctgtgggtggcatttccttttgcgctattcacattcttatgtttcacgacgcctcatttcggtgagaccggaaatatggtatatgcgtatgtcacttatattctgcttgggatgtcctttagtatgcaaacgatcccggtgaacagcttaacggggcggatgacgaattcggtggaggaacgaacggttctgaccacaacccggatgattttggtgtatatcggcattcttttatccatttcctgtgcgacaccgcttgcaactgctatcggaggagaggatcaggcgtttggatttcagatgacggcgctcatctatgcggctgtcagcatcgttttgaatctatttagtttctttactgtacgggagcggattcagcctaaaaagagaaaaaaacaagggatcaaaaagacgttatccgttttattcaaaaacaaacccttgctcatgttaatttcatcatttttggcttttgcgatcgggtttaatattaagctcagcacgatggtgtattattttacgtataacgtaaaccataaagagttcgtgtttatgggcaccgttttatttttcggggcagcgctgatcagcaatttgtttattcctttcttttctgagaagtggggcagaaaacaagtcatgattatcacggcagctctatcgcttatttcttatgccggcctgcattttacgccgtattcttcaattccactcattttcatttggcttttcgcttcgggatttttcacaacgcctttaaatacgcttgcttggggaatggttgcggattgcgtcgattatgcggaatggaaaaccggaattcgcgcggatggtgttgtgatttcgagcatgagctttattaataagctgggtgttgcgttagccgggtcattttcggccatttatttaggaatcgccgggtatgtggcgaatacagaccagacagttgcgtcgttgaatgcgattaaaaatatgaatgctttgattccgggatttttcattttgctttctattattcttatcgccttctatcctttaacggaaaaaagatataaacacatcatctctgagctggagcaaaggtctgcgagataaatagatgtaaaatttttaatattcaatgttgtatttatggcaaaaagtaatatactgagactgtaatctagactttataaatgagtgtgataatatgcgtagtcattctgtagtttgtattggggaattgttgattgatttcttttgtaccgatgttgacgttgatttaatggaagggcgccaattcctgaaaagtgccggcggggcaccggcgaatgtgtcggcagcgattgccaagctgggcggagacgccgctttcagcggaaaagtaggaaaggatccgtttgggtattttctgaagcgaacattggacgctgtacatgtcgatacctctatgctggtgatggatgagaaagcgcctacaacgcttgcttttgtttcattaaaacaaaatggagagcgtgactttgtttttaatagaggcgcggacgctttgtttacgctggaggacattgaccaggaaaaactaaacgaagcgaaaatccttcatttcggctctgcgacggcactgttatcggatccgttttgctcagcctatttacggttgatgtcgattgcgaaagacaatggacagtttatttcgtttgaccctaactaccgtgaagatttatggaggggaagagtctcagagtttgtaagtgttgcgaaaaaagcgatcgctgtaagtgattttgtgaaagtcagtgacgaggaacttgagattatcagcggtgtgaaggatcatgaaaagggagttgcgatccttcatgagatcggagccaacattgtcgctgtgacacttgggaaaagcggaacgcttctttccaatggaaaagaccgtgaaatcattccaagcattccggtgacatcaattgactcaacaggggcgggagatgcttttgtcggtgcggctttatatcaattggcaaacacggatcagattcaatctgtagatgctgattttgtgaaactgcgtgagattgtggcgtttgccaataaggtcggagctcttgtgtgcactaaaattggagcgattgatgcactgccgagtttggatgagattggagtttctttgtaaatcattgaagatgtttcttgaaagtctttggacttttgggggcatctttttttattgcttacatttttgttcaggtaaaaagttgtatattttttgtttgaaatgtcattttttattaaaaaagtgaaacttttaacgataataaatagtatatgtaacaagggttaccgaattagctttaggaggaacgatataatgagtataattggaagatttaaagatattatgtctgcgaatatcaatgctttattggacaaggctgaaaatccggagaaaatggtagatcaatatttaagaaatatgaatagcgatttggctaaggttaaggcagaaacagcagctgttatggctgaggagcagagagcaaaaagagaatatcacgaatgccaggcggatatggaaaagatggaaagctatgcaatgaaggcgctgcaagccgggaatgagagcgatgcgagaaaatttcttgaaagaaaaacatctttggagtcaaagctttctgagctgcaggcggcgaatcaaattgctgcaaccaatgccgcacagatgcgaaagatgcatgacaaattggtatctgacattggagagctggaagcacgcaaaaatatgatcaaggcgaagtgggcagtagcgaaaacgcaagaaagaatgaacaaactaggcgcttctgtttcaagtacaagccaatcaatgtctgcattcggccgaatggaggacaaagtaaataaggcacttgatcaggccaatgcaatggctgaactgaacagcgctccgcaggatgatatggctgatctgactgcaaagtatgacactggcggttcaagccaggttgatgatgaacttgcggcgttaaaagcgaaaatgatgctcgataagtaatacataggaggccgcagctttcggctgcggcgttattttatcataagatgtgagagggaacggtaatgataatatcttataagtgtccgaactgcggcagtgatatggcatttgacagtgaaaccggctcgttatcctgcagcagctgcggaagacaggacaatatggaaagccttccgaaagaaaacattgcggcacggttttctgatgatgaagcaaaagaatatcaatgtgaaaactgcggtgccattttgatcacggaagctgaaacgacagcaacgacgtgcagcttctgcgggggtgctgcaatacttgccgatcgattatcaggtcatttggcaccggcgaaagtcatcccatttacaatcagcaagcaagaagccgagcaggcatttcgaaagtggtgcaaaaaaggccttctgacaccaagaggtttcatgtctgccgatcgcattaaaagcatcaccggcatgtatattccgttttggatgtttgatttaaatagtgaagtacaggtgagagcaaactgtaccagggtccaccggtatgaagaaggggattatatttgcacggaaacagagcactttgaagcatttcgtgatatcaatctcgattatttgaaaatccctgtcgatgcctctgaaaaaatgaaagacgaattaatggacaaattggagccttattcatacgaagagctgaaggactttcaaacggcatatttggccggttatattgcggaaaagtacaattataccgatgaggagctttttccgagggcaaaagagaaaatcagcagttatatagattcatacatccattctactttttccggatatacgtcagtcaatgtgagggacaaacatattcacacgaaaaacgtgaacagcttttacgttttgcttcccgtttggatggtcagttacgattatgaaagagcagagcatatctttgcgatgaacgggcaaacaggaaaggttgtcggaaagccgccgatcagtcgaggaaaagtggcggcatggtttagcggaatagcaggcgggacatttcttgcgttgaagctcgtctcattgatgatgggaggcggattttgatgcgtggattttttggaaaagcgatctttgttgtgctggctgttttcatcatgatgcctttactggggatcgaagcggcaagagcttctgaatcacagcagcatgtgtacgatcgcgctcatctattgtcaaaagcggagatcggaaaacttgaatctctctcggcagagctgggtgcaaagagggacactgatttcatcattattacgaccaaaagcacaaacggtgaagatattgcagactataccggcgatttttatgatcgttacggaaaaggcagtacagccattctgaccattgatatgacaaacagagaagtgtttatcgcaggcttcaaaaaagccgaacagtatttggacaacagcaggctcaatagcatcagaaatacgatttcatctgatttatccaatgaaaattattttgaagcttttgagatatatattcagctttcctataaagatatgggcataaaaccgggagtaaaccccgacaacatattctttacatggtggtttcagctgattgctgccatcgcagtcgggggaattgcggtttcaatcatgctttatcatgcaggcggcaaagtaacggttaatggaaatacatatatggatcagcgtacgtctgatgtgattgatcaatacgacacttatattagaacgactgtaacaagagaaagaaaaccatcagataaagacagcggcagcgatggcggtgttacgaaaggcggcacgtcatacagtgggagccgaggcagtttctagtagaagaaaatagagaaagggagaggcgtaatgtcgtttttcagaaatcaattagcgaatgtagtagagtgggaagaatttagagatgatatgattttttataaatggaacaatcgtgaaatcaaaaaagggagccgtttaatcattcgtcccggacaggatgctgtctttttgaacaatgggcgggttgaaggagtctttcaagatgatggcgattatgatattgaatcagaaattattccattcctttcaacgttaaagggctttaagtttggctttaacagcggcatgcgagctgaggtgctgtttgtcaatacgaaggaatttaccgtaagatggggaacaaaacaggcgataaatattccggcagcgggaatgccaggcgggatacccattcgcgcaaacggcacatttaattttaaggtgcaggactatatcagcctgattgataaaatcgctggcgtgaaagatcaatattttgtagaggatattaaaacccgtatcatttctattctggatcagcttctcatgaagtggatcacaagagaagggaaagatatgtttaatcttcaagcaaacgcttttgatattgccaagggaattcaagaggacttagatatgcaattaataagcgacgggatgacggtcactggttttcaaatcatgagctttaattatcctcaagaggttcaaaatatgattacaaagaacgcttcctacggtatggttggggatgtgaacagataccagcaaatatcaatgacggatggaatggcatccggaaagatgagcggaggcggagcggcttcggatatggctggaatgatgatgggaatgaatatggccaatcagatgatgaaccaaatgaatcaaaatcagcaggcacagtcatcaggcccacagtcaactggcagcggaagcaaaccgaatttctgtccaaactgcggaacaaaaacgggcgaagccaatttttgtccgaattgcggccagaagcttgtgtaagactcatacagtgaaaagtccggagtgatcagcactcgggacttttttatttaggagaataagcgttacctattgcttgctcctgaacaggccattttcgagcccccgcttggataattcccagcagcaattgacggcgttcctttattgaattgacggcaatttgaaatgtttgctttgataaagccggtatgcctgattgttgaagctttgagatgtctggttccggcggcgtgttctgcaggatggatataggcagtatgaacggtatctagatagtttttgatacttgagcgcgcttctttgatatgaagctgattcggctgatattgttcaggaattccgtatttgaaaatggttagagcctcatccaatacagcaacagctataatggatgattcctgatgctgcgtgctgtggtaaaaatgaaggatggggaaggcgttatgctgagcggtcagctttcccagttctgatgaggcagcgacaagaagaaaatcaatgtcgtgaaaatctttgccattccatgcattatggacgatttctgttccgtcatgccctagacttaatacactttgggcaaaggagcgtttttgattaaccgcactcaagacggaaatcaaatacgtgacagaaaacgtgatggtaagcagtccttgagctgtttcaataatcgtgacaagcttccataggcctccgttcggagcgaggtcgccatttcctaatgtaaacatgacatagccggcaaaataaattcggtctggccaggaagccggttctttcgattgaacttccataagtgagtgaggatcgctcgagaaaatcaacacccatccgccccaaaacagactgatccatatcactaatgtcaggcataacagcagaggaccagccatacttagaacctttgcgtggtcaccgctgattctgcggcagcccttccaaagccaggcagacaggcatcttgtgatcgggcctgcaccgctctctaaccataacgtggtccataaaaaatcaatcatccccgctgtcaataataaaaggcctgcaatgatataaccctcattcattttggttgcctcccttaagtcagccttcttttattttcttctctatttccttttatcctgagtctgaaacaattgagcgaatgtttgattttacagagaaaaataggagaagttaaccaacacttactcatttatcgatatgaacaaaaaatcacaggatttttgacttgattcacacattttcatgaagaaaaacgttcattttccccttgaattggtgattttccttttatagagtaaaaaattttcagaaatttatattgactgaaagcgtttttataattatgataatatcagatgtaacaaaaatatcactatcatatcactacaattgaactattaagtgactattaaatgccaaatttacaaggttatacacaaagaaatgaccattgttcttttagtgagaaatgaaatcgcttccatcaggactgacatgctaagaagaagggaaggttatgaggttgttatgaggttattggataaaaacatgaacaactattttctgaagcctgcttacgaaatgtgaggaaggcagcagccctggaatgagtttttgacatacgcattttgaaaaagactgggggaaacagtatgaataaacaaggcaatcaaatgtcatttttacgtacaattattttagtctccactttcggcgggcttctttttggctatgataccggtgtgctcaatggagctttaccgtatatgggagagccggatcagcttaatctcaatgccttcacagagggccttgtcaccagttcacttctttttggagcggcactgggtgctgtgtttggcggcaggatgtctgattttaacggccgccgcaaaaatattttgttcctcgctgttatattttttatttcaacgattgggtgtacgtttgcaccaaatgttacggtcatgattatttcccgttttgtgctcggtattgcggttgggggtgcatccgtaacggtgcctgcctatttagcagagatatctcctgtggaaagcaggggacggatggtgacgcagaacgaattgatgattgtatcaggacagcttttggcctttgtttttaatgcgatccttggaacaacaatgggagacaactcccatgtgtggaggtttatgctggtcattgcgtcacttccagccttgttcctgtttttcggcatgatcagaatgcccgagagtccccgttggcttgtttctaaaggaagaaaagaagatgctttgcgtgtattgaaaaaaatcagggacgaaaaacgggcagcagctgagctccaagaaattgaattcgctttcaaaaaagaagatcagcttgaaaaagcgacgtttaaagatctttcagtcccatgggtgcgccgtattgtgtttattggattagggcttgcgattgtacagcaaattacaggtgtgaattcgattatgtattatgggacggaaattctaagaaattccggtttccaaacggaagccgctttaatcggaaatattgcgaatggcgtgatttcggtattggcaacattcgtcggaatctggctgctgggaagagtggggcgccggccgatgctgatgacaggcttgatcggtacgacaacagcgttattgctaatcgggatattctcacttgtacttgaaggatctccggcacttccatatgtagtcctgtcattaacggtcacattccttgcttttcagcagggggccatttcaccagtgacttggctgatgttatctgaaattttcccgcttcgccttcgcggactgggaatgggtgttacggtattctgtctgtggatggtgaattttgcagtcagtttcacgtttccaatattgctggcagccatcgggctgtccacaacgttctttatcttcgttggattaggaatttgctctgtcttgtttgtgaagaggtttttgccggaaacgaaagggctttcgcttgagcagctggaggaaaacttccgcgcttatgatcacggcggggcaaagaaggattctggggctgaagtgattggataattaaaaaaagaatccgcacccgagtgcggattctttttggttccaaattagttaggtctgacaaggattttgacttggcttttctctttaataagagccccgaagccttcctcgatcaaatcatctagtacgatttttttcgttacgagtttgtcggctgagaaatagccttctttcattaatgacaatacagccgggaagatgtcgcggtatccgataattccttttactgtacgttctttgattacgatatcgttcggatggatttcagcacctttttcccaaatgctgacgatgacggtttcaccggcaattgtagtggactggatggcttgtcgtaacaccactgggacacccgtgacttcgaatgctacgtcaacaccgcctcctgtacgttctgcaatctcagcgactacatcgtctgttttagacggatcaacgatgatcgcgccaagctcctcagctttttgctggcgttcaggagaaagctcaacagcgtaaatatcagttgcaccggcagcctttagcgcttcaatgacaagaagtccgatcgggccgcagccgaatacagccgctttgtcgcctgctttgagtttgcttgagcggacagcgtatagagcaactgcagaaggttcaacgagcgcgccttgttcatatgataattcatcaggaagtttgaacaaaagctcttcatctacagagacgtattcagagaaaccgccgcctccgccggctaagccgaggaatcccatttgttcatcaaggttgtaggcgccttggtggccgtgtgtagcaaaaatcggctcgactacgacgcggtctccaactttataattttcaacgccttctccgacttcgacaacttcaccggagaattcatgccccattgtgacaggagccgtttcatttgttaatgggtgcggtttgtcaaccggaataaagatcgggccgcccagatattcgtgtaaatcacttccgcagatgccgcaccatttgactttgatctttacttttcccggctccgtttttggctcttcgatatgttcaatacggatatccttttggttatgccatcttgctgccttcatggattaccactcctataacttttaatgtgagtaattccgcaccggtcaatatgaactgttcacaaaatcgccatttttaaaaccaaaaaagaaatgaaatttttatataatataatctacgtttttttgaaaaaagaaactttgaagaaaaaagggtctcgcacactcttttttctttatatgagagtatcaatcgtttacatagctatgaatttggtttgaacaatacggtaatggttcgttcatattgaatgcgacaactactctatcaataattataacgctaatactgctattataataggataatcttacatggtttattttagcagaggtaacttttttgactttgtaacattactgtaaggatattgaaataaaaaatagctggttgatcgtgtataatcttcctagatgttaacaaacagggggacgaaatgttgaagaaagtcattttagccgcttttatcttagtaggaagtactttgggagcttttagtttttcatcagatgccagtgcgaaacatgtgaacggaaatattacttggtataacggagtcgggaaaaaaggctcttcaggtaagaaacttggacattgggattgtgcgaccaaaatcggatttgatgttcctagaaacgggacaaaaatcagagcttatgcaaaagcgaagcctaaaaaggtgattacggtttataaaaatgatgttggcagaatgcctaatgcagtgctggatgttagccctaaagcgtttaaagcgcttggatacccattaagcaaagggaaagtagcggggcattacagctattaatgtacatatataatctggaaagcaagaagtcacattcttgctttttctattggtggagataaaagatgaaaaaaagaatcatattattattagcagtgataatagcggcagctgccgcgggggttgcgttttatgttgcaaaggataaaggccatgagaaggctgctgatgtttcagtcaatactgaaagcggtgatgagctgctggtttcaattacagatacggatctgctgacaaagtattatgaaaatgacaaggtgatccatgaggagaagctgaccagctatccggcatttgccttggatcaaaaacagcaggtgctctattatacgggcaataatgaacagaatgaaatgaggctttttaaactggatctaaagtctaataaaaagacggtgctttataaaggcgcggagagtgcggacagtttgtttttatcaaaggaccgttcaaccatctatttccgcttaggaaaatcggacgaaagcaattttcggatcgccgcttttgatctgaaaacgaaaaagtacaaaaatctttatcctgccgctaatgatcaggataacaccgtcagcagcttcttttataaccaaaaaaacgattcatttgcattgcttcattattctgtagaagaagactacaagaaaacagatgaagcaaacgaaaagggcatcgacccagaaccgacaacgattcattttgcggaaggccgccaacataaatttaatgagctgaaaagcctgaaccaatttatcagcgatattgctgtttctgatgatgataaacgtattttattcacatcatatacgcagaaaggaacggagcaaaccgcttctattcagatgctcaatgcggatacgaaaaagtatgaaagcatcatctcaaatcaaaaatcatttaagctgttaattgacgcacagcctcagttctctaaggatggaaagaacatttattttcttgccgaagccaagggggctaaaaaactgaaggatgaaacagggcgtgaagctaaggtgcggacgatttattcctatagccttgaaaataagaccttcaaaaaagtatgggaaaatccaaacggcatcatcaacagcttttctgtgataaactaataaaaaccactcggcataagctgagtggcttttttaatggatgaggtgcagggctaatgatccgagccatttaaagatatgaatcagaggtactgacaaaaacagaagttcaacatatgagttcattgcaacattcagctttttgaacgcagctctttttttcaagtctttttgctgctggtttgagatcacgttatcactcctcttatatccatattataccattgaaacagacaaaaaagccctaaacgtttacagttttgggcttctttcttcgtatttggcctcttgcaatgagaggcttttattctgaaatatagaattttgtctccgttcggggtttgtttgcttgcaggagactgcatttgttatagggaagaactagcttgttttcgtttggctgttgttttggagattcactaatgaacggatgccgtcgaccattttacttccgcacaaagggcacaatggcgtatcactgctggcgaagttttttcgggtccagccattacagtcttcttttgtgcattcccaagtactcacatcttcttttggcagcggttcttgatttcgtttgttatagtaagacataaagtcacttcttccctcatgtattttactgcacattccttattgtctcatacttttccctaatctcctaattcctttttctttatgactttccaataaccccatctaaaaaggagaggagtgtgctgttaaaagcatctggctcttctaaaaacgggcaatggctgcttttagaaaaggtaacgagtgtcgcgttcggaatattgctgcgcaagtgttccccagctgctgtagagaaaaatttcttgtcttccccgaagcacagcaatgtcggcacattgatgttttggagggtgccccggtaatcagcggccgtttggttaaataaaatcgtgctagaaatggcagccggctgtttgaggatttctgccagcatccattctgtttcggtctcggcaggcggttctgcgaacatgttctggatgaagctttcgtagaaaggcagcgggtcagtttgaatggcgtgcatcgctgtttttaagccgtcaaaatcaaatggaccgtgttcccagccctcccattgatagtcggaagcggattgatcgatgatcacagcggcttgaatgttatcattcccaaattgattgagataatcccatacgacaaaagcgcccattgaccagccggcaagaacgacatggtcaagctccattgcatttagaaattcccttatgtcacgggcatattgggaaatggtgtggccgtgaagcactttgtcagattcgccgtgtcctctaagatcaagacgaatacattgataattggcagaaagcgccgaaaattgtttgtggaaaaattgtccgctcatcagcaccccatgtataaacaggatcggcgtcccgttcccgtgtgttacatagtaaaggcgtgtctgatcttctaatgtgatgtatggcatgtttctcctcctttagtttccatcatgagtatggctggctgctgttgagctgatgatggcagctgtcgcggctgcctgctgtgcttgaatgactgtttcgatagcggtgtatagtcctgattccatcagcagatttttctccatatgctcactgagatagaggctgacagcaattttaaagttcatttccttttgccatttaaaagctttttcctggtttaattcgtcagtgatgcacaaaacggttttgatatctggctcttccagaaatgtgaggagagcaaggtctggataatgataatcctttggttttttgacatcagtgatcgattgatatatctgtttgcaagcggaaacaagcatttcgggctctttttcactttgcaaggccagaatatggctgacctgatgtaagtactgtccttttttaaagccgttggctgccagcagttgatagcatgtttccgccttctgtagcgcctgcaaaccttttccgttttctccaagcagtatggcgagcggaacattctgagttgaagtgaggaaataatgatttttcttcatctgctgataaactgctagccccatgttcatctgttctttttggtttgtcgtttcagttttgccggtgagcaagatcagagtggaaaggtatgtgaacatatcccgcttatatcctagcttcaccatttcattgtatacatcgataaaagtatgaaatgtttgttttgcctcatgctgaaaatgaatgtccagaatagatgcaacagtaaagcggtggtgtgaattgagtgttgagaagctgccgatgtttgatttgatatagctgctcaaatcataaaagcgctgaaaatcaaactctcttttattcacaatatatgcagaagaaatgagcattaatatctgatcgtgtgaaactttccattttaattttgattttaattcagcataaatggaaatgtattgctttattttttcatgtaggtcgtgtgtcagcataaaaagcagctcctttttgctgtttttacgtaatacgataaatagggccaaaggtttcataaggaaaaaacttgcctgctagaggcaagtttgtcgggttatttatggggatctgttatatccatcggtctcatcatgtcatagtcttcatgctctagaatatggcaatgccatacgtatcgtccgctgtacggaccgaatgtcgccgcgattctcaggacttcacctgcatgcgcttgaatggtgtctttccagcccttttcacttggcggcggcgggacagccggaccggtataggacaattccccgctttcttgataacgggcgatatcaaacggccgccggtctaatacacggaaggagactagatgcaggtgaatcggatgtgttccgcgtgtcgggttgataatggaccatatttcagttgtgcccacttttggtgcttctgtgacgggatcgtgccagcgtttgttattaagcagaaggacgggtctgccgtattcgtcctgggtgcctgccagttttaacgttctgatgttttgtattctttcatgctgtaccgaagggtatgaggcgaggtacttcggctttctgctttcgtctttttgtgccaatggttttgtgactctgaattgcatgatattcgcatctgtttcaggattgacgtcaccgccgcagcccgcgctgtttgccaaaatgatcgattctccttcatatgctgtgaagtcaatgatgatatcataacgttcagcaggcgcaaggctgaaagaattcagtttaacagatcgcggcaggagccctccatctgaaccaatctgaataaactctccgccattatcgagtgacaggttataggttcttgtattggaggcgttgatgacacggaatcggtatttcctcggctcgacttccaagtatggccataccttcccgttgacgagtatggtttctccgcaaaaagccggaacgattgaaggattaggcagtgacggagaagggttttccggtgcgctcggataaaacaaagaaccgtcctcattgatcgtgcggtctgtgataagaagcggcacatcgtattcgtctgaaggcagttttaagcgtttttcctttgggtcatgaatgatataagcaccgacaagtccggcatagacatttagcctggtgagcgccatggcgtgatcgtggtaccacaatatagccccgcgctgctggtttggataatgataaacctctcttttgaaataaggtcctgtttgttcaaagtctttggaaaaccaagcctccggatacccgtcactatcatctggcgtgacgccgccgtgtaaatgaacaacagtctttacctcgggctcttcatgctggctgtcactgtgatgaatggtgtgatcaattggaaggaaatgcgtggaaggaaggttattcatccattttacatatacgttttcatttcttttaacctcaatggtcggccccggaaataagccgttgtagccccacaggcgggttggagggagatcgcgatggagctgatgagtgcattcctccatggtgacttcgtagtatgttttttcttttgattgctgtactggctttagtgtatctgggattgggagagcatccacaaatttttcaagtgtcattttcatctgtccttatctaaattttccaaattggtactatagttaatgacaataaggacgtgatggttacaaaaaatcttcgtgctgcagaccacccgaagaagaaaataacaaaatcctaaacggcaggccgtttaggatttgatcagcattaaggcaggatatcgggctgctgctgtgtgactgggttggcagccgctttctcgctcaccttgcgttttctgaacacaaggtaagaaatcaaaacgattcccgtgatgacgcctgtcagcagcagctcgtctctcatggaatcaataaacgccatggacactaaaattccgcaaatggcgatgatggtcaagtaggttaggaaagggaagagccacattttgatcttcaatgcttctgggtttgttttttcgagttttttccgcattttcagctgggaaacggcgatgacaagatagacgagtaaagcgattgcgcctgatgagttgactaagaataaaaagacggtatccggtgaaaaatagttcattacgaccgcgatataagagaaaaatgtcccggccacaatggcttgtacgggaacgccttttttgctcaatttcataaaacggcgcggcgcttcatttctttctgcaagtgaatacagcattctggatgtggtatacaaacctgaattcaggcaagagagtacggctgtgaggacgataaagttcataatctgtgcggctgccggcactcctatatgctcaagtacagcgacgaaagggctttctaaaatatttgctgaattccatggcaacagcgccacgacaatggcgattgagcccacgtaaaagacgatgatgcgccatacaacggatctggtggcttttgtcacagattcgatcgggttggatgtttcccctgctgcaatggcaacgatttcagttcccataaaagagaagatgacaacgacaatgccgagcaatacggagctgatgccctccgggaaaaatccgcctttgcctgtaagattcgaaaaaccgactggctcactgcccggtgcaaagccaaaaataaaggcaaaaccaacgattagaaaagcaatgatagtcacaactttaatgagggagaaccaatattcaaactcaccgaaagacttaacggagtagacgtttgtcagggtgagcacaatggtcaagatcaaacttgtcagccacagcggaatatcatggaaccagtattgaataatgccagcaccggcaatggcttcgatcgctatgacgatcacccagaaaaaccagtacagccagccgattgtaaatcctgcccacggtccgatggcgtcgtgagcgtattgagaaaacgatccgctcgtcgggtttacggcagacatctcaccgagcattctcataataaaaatcaccaataatccggctaacgcgtaagaaacaacggcacccggaccggtcgagtgaatcactgaaccgctgcctacaaataggccggctccgattacaccggcaatcgaaatcattgtcatatggcgggtctttaattccttttttaatcctgattgagactggttcataagttacctccttttaaaatgcaatcattactgaatattatgataattgaaactctatcataaatatacagtttgtcgaaaattcgtgtaagaaaatataccagcttatttcaaatttgtagtgttttgtttgcgctttcagcgaatgtgtggaaaaaatgtttcgttttttattcgctgtgtgattttgcgtaatatttacaattcgatagaatgcgagaagcactggtgtccttgggtttgatgggatttttggcggagcaaataaattggatgagagaaaaagtgttccttcgtcactatttttctgtggcgggtgaatcatgtttctgtagacccactgcggatcagctttgtaagataataataggaaaatgtgagcgagaggaggttttgtatggagagatatgatgaactgaaaaagggagaatccggagcgctggtcagcattgccgcgtatctagttctttccgcaattaaactgatcatcggttatctttttcactcggaagcacttacggcagacgggttaaataacacaactgacattattgcttctgttgctgtgctgattggcctgcgcatctctcaaaagcctcctgacgaagatcatccatacggccactttcgagcggaaacgattgcatcgcttatcgcatcgtttattatgatggttgtcggactgcaagtgctgttcagcgccggagaatctattttttctgctaaacaagagacgccagatatgattgcggcttggacggcagcgggcggggcagtcctgatgctgatcgtttaccggtacaataaaaggctggccaaaaaggtgaagagccaggcgctccttgctgcggctgctgataataaatcagacgcattcgtcagtatcggcacatttatcggcattgtggctgctcaattccatcttgcttggattgatacggtcactgcgtttgtgatcggtctgcttatttgcaagaccgcatgggatatctttaaagagtcatctcactctttgacagatggattcgacataaaggacatttccgcttataaacagacaatcgaaaaaatctccggtgtgagccgtttaaaagacataaaagcaagatacttgggcagtacggttcatgttgatgtggtggttgaggtatcggcagatttaaatattacggaaagccacgatatagccaatgaaattgagcggagaatgaaggaggagcatgcgattgattattcgcatgttcatatggagcctttagaacaaaaataatggagcttcctgtcacaggaagcttcagcgtgtcgacaaaccctcgcattcgttgtcaggtctgcgcttcggtgctcacgaattagaacattcgctccgctcctatgctcgtccttcctagacttcaagggttttcaatcacgctgaaaagatgacaaaaccctaaaatgaaagccattttaggattttgtcaacaatctggagcttcctgccacaggaagcttttttgtgtgttttggccagctttattggtaacaatttgctagaatcgtttttttatacagattgctttttgtggtaaagttaggttacattatgatgaattttgtagatgactaggaggaaaataatggcatatcaagaagacctgcatcctttgctggggaaagcagttgaacatattaatagagtaatggttggaaaacgagacatcgccatactcagcttagcagcccttcttgccaaagggcatgtgctgcttgaggatgtacccggagtcggaaaaacgatgatggtccgcgcgctggcaaagtcaatcggcgccgatttcaaaagaatccaattcactccggatttgctgccatctgatgtaacaggggtatctatctataatgcgaaaacgatggaatttgaatatcgtcccggcccaattatgggaaatatcgtgctggcagatgaaatcaaccgtacctctccgaagacacagtcggctttgctcgaagcgatggaagaggggagcgtcacggtagatggccatacgatgcagcttgccgatccgttttttgtgatggcaacgcaaaacccggtcgaatatgaagggacctatcctttgccggaagctcagcttgaccgttttttattcaaacttcggatgggttatccgtcctttaatgaagagcttgacgtcttatctcttcaggaaaaaagccatccgattgagacgcttgagccggttattgcaaaagaagacttcatctgtttacagagggaagtgcaaaatgtccgtgctgatgacagcattaaggaatatatcgttgaaattgtgcagaaaacgagacagcatccttctgttcaattaggcgtcagtccgcgcggctcaatcgccctcatgaaagcggcacaggcatacgcgctgctgcatcatcgcgactatgtcataccggatgatattcaatatttagctcctttcacgctgccgcaccggatgatgcttcattctgaggcaaaatttgaagggattcaggcagaagcgatcgtaagggagatcatgtcagctgtgaaggtgccggttcaaaggtcgtcggtccgctgatgaataagaaatggcaatggctcgtatatggttggaagctgattatattaattttattgacggctgctgttttttcttatgcgatgtttcagggcggctttgtcagctggtttttgttttacgcgtttctcccttttgtcttgtatgccgggctgctggccttgtatccgctccgttcttttcaggcttcaaggcaaatggatagaacacaattacatgcgggggacaggctgggcgtaacggttacgctgagaagaaagctgccatttcccctgatgtatatggtgattgaagattgcctgccagaaggtatcgagtcattaaatcgagacggagccgcggccaaacggctcgtttttccttggtttaaacggagcatgacgatgtcgtatgaattagctcgggtaccgcgcggagagcatcactttcattctgtcagggtgcgaaccggggatgttcttggcttgattgaaaaaacagcattttttgagctgaatgataccttgtttgtttatccattctatcagcgtttttcctatcaggtgaatgagaggcatcaggaagacggtgtaagcggttcttctcctattcatcagcaccattcctcagtcgcagcaagtgtgcggaattatcagccgggagaccggtttgctgcgttagattggaagacctctgcacggcggagccagctgatgacgaaggaatttgagccttctcgcagcaaaaatctgtttctgctgatggaccgtttttcctcagacgcattcgaagaggtcgtttcagtgacagcttcgattcttcattctgttttaaaaaacggcgcgggtgctggtctggcttccatcgggaaggaaaaaaacattttccctattcaggaaggggatcagcattttaagcacatgcttcggcatttagccatcgctcattgtgatgcggcagacccgataagccgatatgcacgggaagagctgggaaagccatctgttcgccaagctgatcaagttgttgtcacgggacagttaacggaagatatgctgcacctcgcagaaataggaggcggccgggttacggtgatactggcaaaagagaaagatgctgagctctctcaagctgaaaatgtcatgattgaacgcatgatgaaacgccaaatcagagttcgggtcatgaggggcgggcgagtttcgcgtgttgtttagaaagagaggtgactggttcacatgccgcacgatgatcacaagggaagccgtttgagcttgctgttattttattttctggcttttttattgctgtgggagtggctcaggccgcttgacagttttactgaaacgaaacatacaggcttttttagtgtctttatcggtttgacgtttctgctgacttttttcaggatgaggtggtttgtcaccgttcctttttgtgtcatatttacattgatctcgatacacatcctgttttatcaaggatctatattcgacttgagctgggtcagctcttttttgcaggatgtctatttgaatatcacgctgattcaatcagggcaatggaatgacatgattccttcttttcggaccctgctgttttttgtgctgctgtggctgctggtctatctcctgcattattgggtgatttaccagagaagaattttgtttttctttatgatgacagtagcgtatattacgattcttgatacctttacgccatatgatgccacttttgccgtcatccgtatcgtgctgatcggcttctttatgctgggccttttatacttggagcgcattaagctgatggaaagaatcacactgccaaaaacatctgtcctcaaatggtttcttcctttatctgtattggttttggctgcaacgggattcggactcgccgctccaaaatcagatccagcctggcctgatccggtgccttttcttaaaaaaatcactcatcaagaccgcgtgtctgcaggggaaagcaaaatcggatacgggaatcatgatgaatcactcggcggcccgttccagcaggatgctacacctgtttttacatggcagggaaaagagcgtacgtatttccgtgtggaaacgaaggacacgtataccggaaaaggctggattgaaacagacacaggcatgtcgtatcagcttagcagaggaaaagttgaaaatctgtggtttgaccataaagttgcgacagagcgccgcaccgtccgtgtaaaagtcgacaagcactacgggtataaccatctgatgtatccgattggtgtggaaaccattcagccaaagcaggctgtctcacttgaaatgaacggcaacacggagcaaatttctccgatcagtgaacaagccggtgaaatcagaaatatggggaattatactgtaacgtacaattccccggtttataagctggatgaactgagaaaggtaaaagtgagaaaaaacagtgaggagtacacattcagcgatcgctacatgcagcttccagattcactgccagagcgggtgagaacccttgcgatcaaactgactcaggatcacgacaatatgtttgataaggtgaaagcggttgaggactatttagggtcaaatgcgttcacctatgaaacagaaaacgtgaccattcctaagaatgatgaagattatgtcgatcaatttctctttgaaacgaaaatgggttattgtgataacttttcttccgccatggtggtgctcttgcgctcggccggcattccggcccgctgggtaaagggttatacgtccggcgaatacaaagaagcaggaaacaaaaatggcagcatctacgaagtgacaaataacaatgcccattcctgggtagaggtgtatttcccggaacagggctgggttacatttgagccgactaaagggtttacaaatccggctgaatttacttcttctgacacaaaggactccggcagcgataaaagcagctcgccgaagaaagcaaaagagaaacagaaagaagagaaaaaacagccgcaaaaagaggaaaaacaaaaggaaaagcgggagccagctgtttctaaaaagccgtccgcttcacataccaatgccggtgcgggcttgtatgcagcgcttgcgattcttgcagtcctcctggtggcagctgtattgctgtatgttttccgctcgttatggattcctgttttcgccgtgaggaaattgaagcggcgcaacgatcagcacgcgttttttgaggcatatgacgcgctgctgaaacaactgaagagaaaagggctgccgaaacgaggcagtgaaacgctgcgtgattatgcaaaacgaatcgatgaaaaatacgacatagaagacatgtcaaagctgacattaagctatgaaagggcgctttacagaaatgaagattcttcagcgctttggaatgattccagagagttatgggaaaatttaattaaaagaagatggtcttgaccgcttatcaacgtgttgttagaattagtgaatattatcggagtctgggagcgagttggcctgactccggcaaacggccttgccaaagagggcggagcgagcttcatatctgtcctcgtttttttctgtgtcaaaaaacttagaggagattaggtgacaaccatgacaaagttagtgaatgaaatgattcttgtccttgatttcggcagtcagtataaccagctgattacacgccgtatccgtgaattcggtgtttacagcgagctgcatccacatacattgacggctgaagaaattaaaaaaatgaatccaaaaggaattattttatccggcggtccaaacagtgtgtatgatgaaaactctttccgctgtgacgagaaaatcttcgagcttgatattcctgttttgggaatttgctacggcatgcagctgatgactcattaccttggcggtaaagttgaagcggcaagccagcgtgaatacggaaaagcaaacatccgcatcgaaggcacacctgatttgttcaaagatcttccaaacgaacaagtggtttggatgagccacggcgatttggttgtagaagttcctgaaggcttcactgttgacgcgacaagccatcactgcccgaactcagcgatgagcaaagcggacaaaaaatggtatggcgttcagttccacccggaagtgcgccactctgaatacggcaatgatcttctgaaaaactttgtattcggtgtttgcgaatgcgaaggcgaatggtcaatggagaactttatcgaaatcgaaatgcaaaaaatccgtgaaacggtcggagacaaacaggttctttgcgcgctaagcggcggcgttgattcctctgttgttgctgttttgattcataaagcgatcggcgaccagctgacttgtatctttgtagaccatggtcttctccgtaaaggcgaagctgagggtgttatgaaaacattcagcgaaggctttaacatgaatgtgattaaagtagacgcaaaagatcgattcttaaacaaactaaaaggcgtttctgatcctgagcaaaaacgcaaaatcatcggtaatgaattcatttacgtgtttgatgatgaagcggacaagctcaaaggcatcgactaccttgcacaaggaacgctttacacagatatcatcgagagcggtacagcaacggcgcaaacgatcaaatctcaccacaatgtcggcgggcttcctgaagacatgcagtttgagctgatcgagccgttaaacacgctcttcaaagacgaagtgcgcgcgctaggcacagagctcggcattccggatgaaatcgtatggcgtcagccgttcccaggaccgggcctcggaatccgtgttcttggcgaagtaacagaagaaaaacttgaaatcgttcgtgaatcagatgcaatcttgcgtgaagaaattgcaaatcacggcttagagcgtgatatctggcaatacttcactgttcttcctgacatccgcagcgttggtgttatgggtgacgcaagaacatatgattacacaatcggaatccgtgccgttacatcaatagacggcatgacatcagactgggcacgtatcccgtgggatgtgcttgaagtcatttcgacacgtatcgtaaacgaagtgaagcacattaaccgcgtggtgtacgatattacaagtaagccgcctgcgacgattgagtgggaataagaaaataacaaaggaaaaacgtccctttttcaaaaggggcgtttttttgttaactttttgaaaccgtttcgacagttttcgtatctaacaacataggaggtggataaggtgaaggaagaaagattgattacaaaggcgagaaaaggaaatgctcgggcctttgaaaagcttatgctggcacatcaggagactttatataaaacagcttatctctatttaagaaataaagaagatgcacttgatgctgtacaggaaacggcttataaagcttttataggtatagaaaaactaaaagagccaaagtactttttaacgtggctcacccgaattcttattaattcaatttttgcaatgaagaaaaagaagggggaattagttccgtttgaaagccatcatgacactggcacggaccaaaggaatattgaagaatatatagacttgcgcaatgcgctggatacacttgatgaacatgttcagttaacaattcagctatattattttcaagattattcgatttcaatgatagctgaacaaacaggaatggcagaaggcacaattaaaacccatttacatagagcgagaaaagcattgaaacaggagctggaaaaggaggatcaaaacaaatggacaaacaccaagtaaagcagatatttgatgatattgaagtgcctaagaaagcgctaaaaaagacagtacatcaagctgtcgttcgtgctgaaaacgaaggtaacacgaggcgccgttttaaatggggacgaacctttacaaatggaattgctgttgctgctgtggtaggtatactgtatttaacgtccggcctttttctgccttctgtaaacaaagcgatggggagcatacccattgtcggacaaatttataaggattttcaagataaagttggtctatcattgtttaaaagcaatttggtcacagctttaaatgaaaaagcagactccaggggaatcactgtttctgtaaacagctcctattacgatgccggacagcttgtttataacttcactgttgataacttccactctgatgaaaaagagatcatgtatgatgtcgacgaaacgagttatagcgacaacttttcaatcaactacgattccttaatgcttaaaaaattaaataacaagcaatacgcaggacaattaaggatttatacaaatggtactgaaataaaaaatggggaaaccgtgccctttgtaattactcatatcaatgaaatacagggaaattggagattcaaactgcctattaccaaaaagaatgcgggttatttagaaagctcaaaagttatatcggcttatcataatcgttatcaattttccaatattcaagtggaaaacgggaaacttggatctgtccttcaatttacaatcgattatcaaggcatagcaaagcatgatacggttgaaattaacgaagttaaagatgatttaggaaacacatacgagatgtcagcatcaaacatcgaacttggagatcgcataaaggtaaacgagagaacggttagagcaaaaggacaaacacagttagaatcaccaatcaatccaaaagcgaaaaagctaacattaattgcagatattagatctgaggctgagggcagtgaaatcgtccctctaaatgcagagatgccgtatcgtctttcggaaacaaagcatcaaaacatagggatagaaatcaataacattaaacaagaggggagggaagtattggttcattaccgtttcactggagttgatacttcaaatatgtcaaaagatgacttagtgaatataggtgaaacgattggccttggtgatataaaaaaaatgcaatcttggcctgatccagtaggtgattatgaagaaggttattatttgaaaggaaatattgctaaagtgaaaaatatgaaaacagccgaaatggtatctacttttgaactggatgatgattataatgataagctgtctttaaagcattttgagtttaatgaatacggtctgtatattgataacggcgttttaaatgacctgattcaactaaagccattctcgtttactgtaccagtgcatcaggtgagtcagcctaccgaaaaaaaataatcataagttgaaaagccgtatgttgccatacatacggtttttatcattgttaccaatttagtcaatagacgaataaaccaatttttttaataagtaatgttcgttgtttatattgtcaattcaaaatgaacttggtacaatagacacagaaatcaaataagatgaattcgtataatcgcgggaatatggctcgcaagtctctaccaagctaccgtaaatggcttgactacgtaaacatttctttcgtttgatataaataaaacacgtttatttattcgaactgaaatccgtctgtagtcaagcgtcccaaaatgtattgggacgttttttatttggcgttttcaggacagaataaatagcaaagagtgaagggagtcaaatagcttgaaaacgttttttcagtttgatgagctgggcaccagctatcgcaatgaaatcattggcggattaacgacttttttatctatggcatatattctgttcgtcaatccgattacgcttgctttggagagcgtgaaagattttccggaggcgctgagaattgaccagggtgcggtctttacggcgacagcgctggcgtctgcagcaggctgtatcttaatgggattaatagcgagatatccgattgccattgcgccgggtatggggctgaacgcgttttttgcgttttctgttgtccttggtatgggtatttcatggcaggcagctttgtccggtgtttttatttcaggtcttattttcgttgctctttctttaacaggttttcgtgaaaaaatcatcaacgccattccgcctgagctgaaattggcagtcggtgcggggatcggcctgtttattacattcgttggcttacaaggctcaggaatcattactgcaaatccttctacgctcgtcacgatcggaaacattcacagcggtcctgtgctgttaacgattttcggtgtgattgtcacggttattttaatggtgcttcgcgtgaacgcaggcgtgtttatcgggatgctattaacagcggtagccggcatgattttcggtttggttccggttccgactcaaattatcggcagtgtgccaagccttgcgccgactttcggacaagcgtggattcacctcccggatattttctctgtacaaatgctgatcgttattttaacattcttgtttgtcggattttttgatacagctggtacacttgttgctgtggcaacacaagctggtttaatgaaggaaaacaaattgccgcgtgcgggccgtgcgcttttagctgattcatcttctattgtgatcggtgccgtgcttggtacgtctacaacaacttcttacgtggaatcaagctcaggtgtcgctgcgggtgcccgttcaggatttgccgcaattgtaacaggaattctctttttactggctacgtttttctctccactcctatcagtcgttacgtcaaatgtaacagcgccggcgcttattattgtgggtgcattgatggtggcgccgcttggcaaaatcgcttgggataagttcgaggtggccgttcctgctttccttaccatgatcatgatgccgttaacgtacagcatcgcgactggtattgccatcgggtttattttctatccgattacaatggtgtgcaaaggaaaagccaaagaggttcatccaatcatgtacgggctgtttatcgtatttatcctgtactttatcttcttaaaataagaattgaaaaaccagctgcaccggcagctggtttttttgttgcaaaagataaaaccatttcatacgatataccgtcatgtagatgtgccgccatgctttacttaaatggaaatgacttgactgttcaggaaggcttcggtaccttatataagtgttttattttcttgctgaatggtattccgccgtatttttttgataggagttgctgacatgacggaagaaagaaaagaaacgtttgaagaagaaattaaccagagtgaaagaatagatgcagatgaagaaccgctatcgagaatgtccagaaaggcgagccggcaaagcaagcagaagcaaaaacaaaagcagaaaccgcgccaggaacgcggtgaatcaactgttaaagacaagcttgcgtctgtttgggcagccatcaacagatattgcggttttgcgttctcgattttaaaatctccggcgaaaactgtcgtaacggatggtttttctcattataagtacggtctgatttcaatgcttatattcagtatcattttttcaattgggaattggtttcagttaaaggcaagctggaatcggccgctcggtttcggagaacgccatcatgctttctatgacgggtttttagttgttcttgtgtatttgctgatctttttcgcggtaatggtctttgctatatgggctgtctcccgctatatgatgaagcagaaggtgacgttcagagaagcggctgccgtattgggttcattgcttgtacccgtaattgctgtttcaatcctttggctgatctttgcgatcgtaaatatcccaatgctgacagtactgtttacggtgctgatcttgttttccatcttttttatcatcgcgctgtatgtacagcgtgtgtaccaggcggcacaagatgcatcaattgattatatctattgtgtatttgcagtggttgcgatagcgctgctgtttacggcagtgacttggccgtttatttcggaatattttacggcgtcgctgattccgctttaatgaaaaaaccggctaatcctagccggtttttttatgtcacactttttacaaatatatctaaaaaacatagttgatttgtaggattaacccgtgtatgatggggaaaatgctgaaaacgtccagcgcaaaaacctttatgtttaaggaggatgatggacatggctgatgtacttcgccgagcaattaaccaaaagaagcaatttttaaaaaccaaattactgctctcggaattttatcaaggaagaggggaacagcttgcggactacacgctgagtgagcttgagaaagaatacaagtcccttcagaaaatgaaaaaagagatctgacaatagatataaagaggtgagtctgctgaaaagcgggcttttttgttttgattttgaaaaggcgagaaagagggtaaactactactgttcaacgcataaaagcatgtcgaaatattttgcttaagcttatgggcgaagctgattgtaaacggctcatttctctagtagaatatgaatgctttgtgcaagctgaagagtagggggatgaataaaatgatgcaaaccatcttatcaaatgggatagccatggttctcataattctcattattaatattgtctatgtgtcattttttacgataagaatgattttaacgctgaaaggacagcgttatttagcggccggcatcagtacgattgaaatactggtttatgtgacaggactgagtctggtgctcgataacttagaccagattcaaaatgtgatcgcgtacgcgcttggttacggtcttggcgtaattgtcggcatgaaaatagaagaaaaattggcgcttggctatattatggtcaatgtgattacgaaggagctcgatcttgatcttccgaagcagctccgtgaaaaaggctacggcgtgacaaattgggtggcaggcgggcttgaaggcgaccgcacagcccttcagatcctgacgccgagaaaatatgaactccagctatatgatacgattaaaacacttgattcaaaagcctttattattgcgtacgaaccaaaaacaatccacggcggcttctgggtcaaagcggtaaagaagaggagaattaaagaataatggcaaagccgaagaagaaaaagtttgaagtgacagagcagcaaacgattgatgcggtgcttcagcaaatgaaagaagaaggatatctgcctgtaaggcgaatggaagagcctatttttatggaaaaaaaggaaaatgggtcaattcagatcgttccgtgcgggaaaaaaatagtatttgaagggaaattgatctaaaacacgaacattattagaatgaatttttgtatcgttcgataatatcgttgacattatccatgtccgttgttaagataaacatgaaatcaaaacacgacctcatataatcttgggaatatggcccataagtttctacccggcaaccgtaaattgccggactatgcaggaaagtgatcgataaaactgacatggatatatcgcagaagcgaacgactgacgatacatgtaccatgcccggtttgtattgcttcctcataagtgcaatgcagagcgggtattttttattttctgaaaacaaaagcattagaaggtggggaacagaatgcagccgctagtaggaatcatcatgggaagcacttccgattgggagacaatgaaacacgcatgcgacatacttgacgaactcaatgttccgtacgaaaaaaaggtcgtttccgctcaccggacgcctgatttcatgtttgaatatgctgaaactgctagagaaagaggcatcaaggtgattattgccggtgccggaggagcggcgcatctgccagggatgacggctgcgaaaacaacactgccagtcattggagttccggttcagtccaaggcgctgaacggaatggattcacttctttccatcgtccaaatgcctggaggcgtgcctgttgcgacaacatccatcggcaaagcgggtgctgtgaacgcaggcctgttagcggcgcaaattttgtcagcatttgacgaagaccttgcccgtaagctggatgagagaagagaaaatacaaaacagacagtgttagaaagcagtgatcagcttgtctaaacaaatcatctatccgggagctgtaatcggcattatcggcggcggccagcttgggaaaatgatggctgtgtccgccaaacaaatggggtataaagtcgcggtcgttgatccggtgaaagattcgccgtgcgggcaggttgcggatgtcgaaattaccgctcattataatgaccgtgaagcgattcgaaaattggctgaaatcagcgatatcatcacatatgagtttgaaaacatcgactatgatgcgctgcattggctgaaagatcatgcgtatctcccgcaaggaagtgagctgctgctcattacccaaaaccgtgaaacagagaaaaaagcaattcaatccgcgggctgtgaagtcgcaccgtacagcatcgtcaaaacaaagaatgaattgaaacaggcggtacaagagctcgggttacccgcagttctgaagacatgccgcggcgggtacgacggcaaaggccaatttgtgataaaagaagaggcgcaaatggagcaggcagccgctctgttagaacacggaacttgcattcttgaaagctgggtttcttttaaaatggaactgtcggtgatcgtcgtcagatcggtaaacggtgaaatttcaacgtttccgacagctgaaaacattcaccacaacaatattcttttccaaagcatcgtgcccgcacgggtagagaaagggattcagcagaaggctgctgatctcgcagttaagcttgcagatgagcttaaccttgtcggaccgcttgctgttgagatgttcctgacagaggacggagagcttttggtcaatgaactggcgccaagaccgcacaattctgggcattatacgctggacctttgcgagacgagccagtttgagcagcatatcagagcggtatgcgggcttccgcttgggaagacagatttgctgaagccgggcatgatggtgaatcttctcggcgatgaagtgaagcttgttgaggaagacccggagcttttaaaagaggcaaagctatatatatacggaaaacatgaaatcaaaaaaggccgcaaaatggggcatattacatttatgaagcagcctgaagacgaatggattcaggagatcacaaatcaatggatgaatagagacggaggacaagcagaatgatcgaacgttattcaagacctgaaatgtccgcgatttggacggatgaaaacagatttcaagcatggctggaggtagagattcttgcctgtgaagcgtgggcggagcttggtgtcattccgaaagaagatgtaaaggttatgcgcgaaaacgcgtcatttgacatcaaccgcattttagaaatcgaaaaggacacgcgccatgacgttgtcgcttttacacgcgccgtttccgaatcactgggcgaagaaagaaaatgggtgcactacggattaacgtcaactgacgttgttgatacggctctttcctacttattaaaacaggcaaacgatattttgctcaaggatcttgagagatttgttgacattattaaagaaaaagcaaaagaacataaatacacagtcatgatggggcgcacgcacggcgtacacgctgagcctacaactttcggcttaaaacttgcgctttggcatgaagaaatgaaacgtaatcttgagcgcttcaaacaagcgaaagcaggcatcgaggttggaaagatttctggcgctgtcggcacatatgcgaacattgatccatttgttgaacaatatgtctgtgagaagctcggattgaaagcagcaccaatttccactcaaacccttcagcgtgaccgccatgctgactatatggcaacacttgctttgatcgcgacaagcattgagaaattcgctgtggaaatccgcggactgcaaaagagtgaaacacgtgaagtagaggaatttttcgcgaaagggcaaaagggttcatctgcaatgccgcataaacgaaatccgattggctctgaaaacatgacaggcatggcgcgcgtgatccgcggctacatgatgacagcttacgaaaatgttccattatggcatgagcgcgatatttctcattcttcagcagaacgaattattcttccggatgcgacaattgcgctgaactacatgctgaaccgcttctccaacatcgtgaagaacttaacggtcttcccggaaaacatgaagcgcaacatggaccgcactctcggccttatctattctcagcgtgtgctgcttgctttgattgacacaggcctgactcgtgaagaagcctatgatacagttcagccgaaagcaatggaagcgtgggaaaaacaagtgccgttccgcgagcttgtggaagcggaagagaaaatcacgtcacgtctttctccagaaaaaattgctgactgctttgattacaattaccatctgaaaaatgttgatctgatctttgaacgtttaggtttagcatagaagaagctattagcggcttcttctatgccgccgcagtttgaaaattcccaacattcgggttaggaggccttccgtgaatattgtgaagaatgaacttttatacgaaggaaaagcaaaaaagatctacaaaaccgatgacgaaaacacgctgtatgtcgtgtataaagactccgccactgcctttaacggcgagaaaaaagcagaaatcagcggaaaagggcgcttaaataatgaaatttcaagcctcattttcaaacaccttcatgctaagggcattaacaatcattttatcgagcgcatttcggaaacggaacagctcattaaaaaggtaacgattgtgccgcttgaagtcgtcgtcagaaatgttgtggcaggaagcatgtccaaacgtctcggcattccagaaggcacggagcttgagcagccgattatcgagttttactacaaggatgacgcgctgggtgatccgctcatcacagaagatcatatttggctcttaaaagcggcgactcctgagcaggtagaaaccattaagtccattacaaaaacagtaaatgaagagcttcaaagcattttcgacgattgtcatgtcagattaatagatttcaagcttgaattcggtctagatgcagaagggcaagtgcttttggcggatgaaatttctcctgacacatgccgcttgtgggataaagaaacgaacgaaaagctggacaaagatttattcagacgcaatctgggaagcttaaccgacgcatacgaagagattttcaaaagactgggaggcattcatcatgtataaagtaaaagtttatgtcagcttaaaagaaagtgtactagatccacaagggagcgctgtccagcatgccttgcacagtatgacttacaacgaagttcaagatgtgcgcatcgggaaatacatggagcttaccattgaaaaatctgaccgtgatcttgacgtgctagtgaaagaaatgtgcgaaaaacttcttgcaaacacagtgattgaagattacagatacgaggttgaggaggtagtcgcacagtgaaatttgcggtgattgtgttacccggctccaactgtgatatcgatatgtatcatgctgtaaaggatgagctcggccatgaagtggaatacgtctggcatgaggaaacaagtcttgacggcttcgacggcgtgttaattccgggagggttttcttacggcgattacttaagatgcggcgccatcgcccgatttgcgaatattatgccagctgtcaaacaagcagcggctgaaggaaaacctgttcttggcgtctgcaacggattccagattttacaggagcttggccttctgccaggtgcaatgagacgcaacaaagatttgaagttcatttgccgtccggttgaattaattgttcagaacgacgaaacgttattcacagcttcctacgaaaagggacaatcgattacaatcccggttgcccacggtgaagggaatttctactgtgatgacgagacgcttgcttcattaaaggaaaacaatcaaattgctttcacatacggctctaatattaatggaagtgtcagcgacattgccggtgtcgtgaatgagaaaggcaatgtattaggcatgatgcctcaccctgagcgcgcggtcgatgaactgcttggaagcgccgacggtcttaaattgttccagtctatcgtgaaaaattggagggaaactcatgtcactactgcttgaaccaagtaaagaacaaataaaagaagagaaactgtatcagcaaatgggtgtcagtgatgatgagtttgcattgatagaatccattcttggaagattgccgaactacacagaaatcggaattttttctgtcatgtggtctgagcattgcagctataaaaactcaaagccgattctgcgtaaattcccgacaagcggcgagcgtgtgctgcaggggccgggggaaggcgccggaatcgtggatatcggtgataaccaagcggttgtgttcaaaattgaatcacataaccacccatcagctctcgagccttaccaaggcgctgcgactggcgtaggcggaattatccgtgacgtattttcaatgggtgcacgcccaatcgctgtattgaactctcttcgatttggtgaactgacttcaccacgcgtgaagtacttgtttgaagaagtagtagcgggtatcgccggatacggcaactgtatcggcatcccgacagtcggcggagaagtgcagtttgacagcagctatgaaggaaatccgctcgtcaacgcaatgtgcgtcggtttaatcaatcatgaagacatcaaaaaaggccaggcaaaaggtgtcggcaacacagtaatgtacgtaggagcgaaaactgggcgtgacggcatccacggcgctacgtttgcttctgaagaaatgtcagactcgtctgaagaaaagcgttctgctgtccaagtcggcgatccgtttatggagaagcttttgcttgaagcatgtctggaagtcatccaatgcgacgccttagtcggcattcaggatatgggagctgccggtttaacaagctcaagtgcagaaatggcaagtaaagccggttctggcattgaaatgaaccttgacctgattcctcagcgcgaaacaggcatgaccgcgtatgaaatgatgctttctgaatcacaagaacggatgcttttggttattgagcgcggacgtgagcaggaaatcatcgatatttttgacaagtacgatcttgaagcggtttctgtcggacatgtgacagatgataaaatgcttcgcctgacacacaaaggagaggttgtgtgcgagctgcctgttgatgccttggcagaagaagcaccggtttaccataagccttctcaagagcctgcttactatcgcgagtttttggaaacggacgttcaggctccgcaaattgaagatgcgaatgaaacgctgaaggcccttcttcagcagccgacgattgcgagtaaagagtgggtgtatgatcagtatgactacatggtgcgcacgaatacagttgtcgctcctgggtctgatgctggtgttctcagaatccgcggaacgaaaaaggcgctggcgatgacgacagactgtaacgcgcgttatctctatcttgatcctgaagtcggagggaaaattgctgtcgctgaagcagcgcgcaacatcatttgctcaggcgcagaaccgcttgcggtcacagataaccttaacttcggaaacccggagaagccggaaatcttctggcagatcgaaaaagcggcagacggcataagcgaagcgtgcaatgttctcagcacaccggttatcggcggtaacgtatcgctttataacgaatcaaacggcacggcgatctatccgacaccagttatcggcatggttggcttaattgaagatacagcacacattacaacacagcatttcaaacaagcgggagatctcgtatatgtgatcggcgaaacaaaaccagagtttgccggaagcgagctgcaaaaaatgacagaaggccgcatttacggcaaagcgccgcaaatcgatcttgatgtcgagctgtctcgccaaagagcactgcttgacgcgattaaaaaaggcttcgttcaatctgcgcatgatgtgtctgaaggcggcttaggcgtagcgattgcggaaagtgtcatgacgacggaaaaccttggcgctaatgtgactgtagaaggggaagcggcgttattattctctgaatctcaatcccgcttcgtcgtttcagtgaaaaaagaacatcaagctgcgtttgaagcaactgtcaaagatgcgattcatattggtgaggtaacagctgacggaattctggcgattcaaaaccaagacggacaacaaatgattcatgcgcaaacgaaagagcttgaacgcgtatggaaaggagctatcccatgcttgctgaaatcaaaggcttaaatgaagaatgcggcgtttttgggatttggggacatgaagaagccccgcaaatcacgtattacggtctccacagccttcagcaccgaggacaggagggtgcgggcatcgtagcgactgatggtgaaaagctgacggctcacaaaggccaaggtctgatcactgaagtatttcaaaacggcgaactcagcaaagtaaagggaaaaggcgctatcgggcacgttcggtacgcaacggctggaggcggcggatacgaaaatgttcagccgctcctcttccgttcccaaaacaatggcagcctggcgcttgctcataacggaaatcttgtcaacgccactcagctaaagcagcagctcgaaaatcaagggagcatctttcaaacctcttcggatacagaggttttggctcacctgatcaaaagaagcggacacttcacgctgaaggaccaaattaaaaactcgctttctatgctgaaaggcgcctacgcgttcctgatcatgaccgaaacagaaatgattgtcgcacttgatccaaacgggctgagaccgctatccatcggcatgatgggcaacgcttatgtggtcgcatcagaaacatgcgcatttgacgtcgtcggcgcaacgtaccttcgcgaggtagagccgggagaaatgctgatcattaatgatgaaggaatgaaatcagagcgtttttccatgaatatcaaccgttccatttgcagcatggagtacatttatttctccagaccagacagcaatattgacggtattaacgtacacagtgcccgtaaaaaccttgggaaaatgctggctcaggaatccgcagttgaagctgacgtcgtaaccggggttccggattccagtatttctgcggcgatcggctatgcagaggcaacaggcattccgtatgagcttggcttaatcaaaaaccgttatgttggcagaacgtttattcagccgtcccaggctctgcgtgagcaaggcgtcagaatgaagctgtctgcggtgcgcggggttgtagaaggcaaacgcgtcgtgatggtggatgactctatcgtgcgaggaacaactagccgccggattgtcacgatgctaagagaagcgggtgcgacagaggtgcatgtgaaaatcagttcaccgccgatcgctcatccgtgcttttacggcattgacacttccacacatgaagaactgatcgcgtcttcgcattctgttgaagaaatccgtcaggaaatcggagccgataccctctcatttttgagtgtggaagggctgctgaaaggcatcggcagaaaatacgatgactcgaattgcggacagtgtctcgcttgctttacaggaaaatatccgactgaaatttaccaggatacagtgcttcctcacgtaaaagaagcagtattaaccaaataaaacttgaaaaatgacataaaggcagcgcagttcggctgcctttctctttctgccctcgttcggggagatattttgaaaagcgccttaaaggagtgaataggatgtctgaagcatataaaaacgcaggagttgacatcgaagccggatatgaagctgtaaaacgaatgaaaaaacacgtggagcgcacgaaacggcttggcgttatgggcagccttggcggttttggcggcatgtttgacctgtctgagctttcttatcaaaaaccagttctcatttcgggaacggacggtgtcggcacaaaattaaagctcgctttttccatggataagcatgacacgattggcgtggacgctgttgcaatgtgtgtcaatgacgtgctggcacaaggtgcagagccgctgtttttcctcgattatttagcggttggcaaagcggacccagtgaaaattgaacagattgtacaaggtgttgcggaaggctgtgagcagtcaggttcagccttagtcggcggtgaaacggctgaaatgccggggctctatacagctgatgaatacgatattgccggtttctcagtcggagtggcagaaaaggacgaaatcgtgactggagaaaacattgaagagggccatctgttgatcggtctcagctccagcggccttcacagcaacggcttttcccttgtcagaaaagtgcttctggatgatgcggagctggacctcgatacaacatatgagccgtttgaacgcccgcttggcgaggaattgcttgaaccgacaaggatttacgtgaagcctgtgcttgccgcggtcaaaagcggaaaaatcgacggcatggcgcacgtgacaggcggaggatttattgaaaatattccgcgtatgcttccggaaggcttaagtgcggaaattgatcatggctcatggccgatcccgccgattttctctttcctgcaagagtacggcaagctgaaggaagaagacatgttcaacgtctttaatatggggatcggttttgttttggctgtcaaagaagagcatctgacagatgtgatcggaacgcttgaaagccatggcgaaaaagcctatttaatcgggcgtgtgaaaaaaggtgaaggcgtcacattcggcggtgcggcactttcatgaaaaagtttgcggtatttgcatcaggaaacggttcaaacttcgaagccatcgttacgcgtttgaaggaggagaactgggatgcgtcagcagcgctcctcgtttgcgacaaaccgcaggcgaaagtcatcgaacgggcggaagcattccacattccatcctttgcatttgagccgaagtcttatgaaaacaaggccgcatttgaacaagccatcattgaacagcttcgtcttcacgaggttgaattgattgttcttgccggctatatgaggctgatcggtgatacgctccttcaagcatatggaggaaaaatcattaacattcacccgtcgcttcttccggcgtttcctggaatcgacgcagtcggacaggcgttccgggcgggtgtgaaggtggccggaatcaccgtgcattatgtcgatgaaggaatggatacaggtccgatcatcgctcaaaaggcaatcgaaattgatgaacatgatacattggaaacaatcgaacagcgaattcacaagcttgagcataaatggtatccgagtgtgattaaacagctattaggattaaataacagaggtgaaaaggcatgaccattaaacgtgcattaatcagtgtttcagataaaacaaatctcgttcctttcgtaaaagaactgacagagcttggcgttgaagtcatctccacaggcggaacgaaaaagcttcttcaagaaaacggtgtggatgtgatcggaatttcggaagtgacaggcttccctgaaattatggacggccggttaaaaacccttcacccgaatattcacggcggccttctggcggttcgcggcaatgaagagcatatggcgcagatcaatgaacacgggattcagccgattgacctcgttgtcgtcaacctctatccatttaaagaaacgatttctaaggaagacgtcacatatgaagaagcgatcgaaaatatcgacatcggcggacctggcatgctgcgtgcggcatcaaagaaccatcaggatgtcacggttatcgtcgatccggccgattacagcccagtgctgaatcaaatcaaagaagaaggcagcgtatctcttcagaaaaaacgcgagctcgcggcaaaggtattccgtcatactgcggcatatgatgcactgatcgctgactatctgacaaatgttgtcggtgaaaaagaaccagagcaattcactgtgacatttgagaaaaaacaatcgcttcgctatggagaaaacccgcatcaggaagcaactttctatcaaacagctcttcctgtcaaaggctccattgcgcaagcagaacagcttcacggaaaagagctttcttacaacaacattaaagacacggatgcggcagttcaaatcgttcgtgaattcactgaaccggctgctgttgctgtgaagcacatgaacccgtgcggtgtaggaacaggaaaaacgatcgcagaagcgtttgacagagcgtttgaagcggataaaacatctatcttcggcggcattatcgcgctgaaccgtgaagtggacaaggcaactgccgaagcgcttcacaacattttcttagaaatcatcattgcgccttcattcagccaagaagcgctcgacgtcctgactgcgaagaaaaatctccgtctgctgacgcttgacgtatccgccgctgttcaaaaggaaaaacaactgacatctgttcaaggcgggctgctgattcaagatttagatatgcacggcttcgatgatgctgagattagcattccgacaaaaagagagccgaacgagcaagagtgggaagacttgaagcttgcttggaaagtcgtgaagcatgtgaaatcaaatgcgattgttctcgcgaaggacaacatgacagtcggcgtgggagcaggccaaatgaaccgcgtcggatcggcaaaaatcgcaatcgagcaagcaggggaaaaagcgaagggcagcgcgctcggttcggatgcatatttcccaatgccagatactgtcgaagaagcggcaaaagcgggcgttacagccatcattcagccaggcggatcgatccgagatgaggattccatcaaaaaagcggatgaatacggcattgccatggtattcaccggcatcagacacttcaaacattaaggggatgaaaacgacgtgaatgtattaattatcggtaaaggcggaagagaacatacgctggcgtggaaggcagcgcaaagcagcctcgtcgagaatgtatttgccgctcccggaaatgacggcatggcagcttccgctcagcttgtaaacattgaggaaagcgaccacgcagggcttgtctcatttgcaaaacaaaatcaggtcggcctgaccattgtcggccctgaggttcctttaattgaaggtctggtggatgaattcgaaaaagcgggcttacatgtgttcggtccgtcaaaagctgcggcgatcatcgaaggaagcaaacagttcgctaaggatttaatgaagaaatacgacattccgaccgcagaatacgagacgtttacatcctttgatgaggcgaaggcatatgtgcaggaaaaaggtgctccgattgtgataaaagcagatggacttgcagctggaaaaggcgttactgtggctatgacagaggaagaagcaattgcgtgcttgcatgactttcttgaagatgaaaagttcggtgatgcgagcgcgtccgttgtcattgaagaatacctttctggtgaagaattttctctaatggcctttgtcaaaggagaaaaagtgtatccaatggtgattgcccaggatcacaagcgtgcgtttgacggagacaaaggcccgaatacgggcggaatgggcgcttactctccagttccgcaaatttcggaagaaacggttcgccatgctgtagaaacgatcgttaagccggccgcaaaagcaatggtacaagaaggccgttccttcactggcgttttgtacgctggattgatgcttactgaaaacggctcgaaggtcattgaatttaatgcccgtttcggcgatccggaaacacaggtcgtgcttccgcgcatggaatctgatctggtacaggtgcttcttgatcttttagatgataaggaagttgacttaagatggaaggataccgctgctgttagtgtggtgcttgcttctgaaggatatccggaaagctacgcaaaaggcacgccgatcggcagccttgctgcggaaactgagcaggtcgtggtcttccatgccggaacgaaagcagaaggcggagagttcgttacaaacggggggcgcgtcgccaatgtgacagcttttgatgaatcgtttgaagcggctagagaccgagtgtacaaagcggttgatgaaattttcaaaccgggactctttttcagaaaagacattggggcacgcgctttacaggctgcccaaaaataagtgaggaaaacccgcagattagctgcgggttttttgttatcaaaaagcgggatggcagctggaagaagaaagcacaacgagcgtggttggttttccatgggccatcgaggcgtcaataaaatcctcaagcgtatgtaccgattcagtcacgacctttgtcacatagctgtacatccccgtgatgcggtggttttctgctacatcagggtgcgcttttgcaaaggcggcgtagtgcttgcagcttttcggctccatgagaatgaaagcggtgacatgcttgtttagtttttcataacagatattcgcgctgtacccggtaatcactcctttgtcttccagcttcctgacacgctccgccgcgcttggcgagctgagtccgacaagctttcccagctcaaccatcgttaatctgccatttcgctgcaaatgcgagagaatctgaaggtctgtatcgtccatttgtctggctcctttacatatttaggcgaatgaatgaaaattcctttgatcgtaaggtaatgctgttgatttaccttcattgtagcatatggatgccgtcttattttttctataataaagccatcaacgggagaggaggcatcatgttgccagaattgcagcgctctattacttggatacaagggacggcgttaacgattggggcggttttaggatgcgggatattaattttgccgtctgttaccgcggatacggccggtccggcttctttatttgtttgggtattcatgtcttttttatcttttcttctcgtctgtacgctggcacggcttgtgaaaattgcgcccagcgcgggaggaatcactgcttatgtgcagctggcctttcagaaaaaagccggggctattttgggctggatcatgttaggttccgttccgatcggcgttcccatcatcgctttgactggcgcgcattacgtcagttacatcacagaggcggccgattggcagattacattgattgctggttgcatgctggctatatctattttgcttcatatgagaggcattcaactatcagcaaacatcagtacactcgttatttgtgtcatcgtatttctgcttgtcacttctattgctgtgtcattgccacacgtcacgatagcagaattcaaaccgtttcttccgcatggctggtctgccgcgggatctgtttctgtcatgatttttttctcttttgtaggctgggaaatgattaccccgttggctgaggaatttcatcgccctgaaaaagatgtcccgctcagcttgtttttggcagcgtcttgtgtggcagggctgtatatcatgctgtcatttgtaacagtgggaactcattcatacggagagaatggagaaattgcatcgcttgccatgctcatctcaaaaggagcaggggaaagcggtgtatacgtcacggtatgcttagcgctgtttattacattcgccaccatccatgccaatattgccggtttttcaagaatggtgtacgcattggcgagagaggggcacatacccgtattttttggaaaactcagtgcgacaaaacgtacgcctattcgcgttttgacagcgatggccgcagtgtttggcttagtgcttgcggcgcatggtctgtttcaaatcgatttgacgactctgttgaaagggccgagcgcggcttttatcgcatcttacatatgtacaatggcggcagcactgaaactgctgggcaggagagatataggctggtggatggcgctcggggcatttgtggcgtgcgcggtgatttattcattcagcggctgggcactgctttatccggcagtgctggcagctgcaggatatctctatatggaaacaaagggtgggcataaaaaaaagcttgatcacgttttgtgatcaagcttttccatttatccgttttgatgctcgttatttccagaatcgctgtgttgaaacatgtaggtcacaggacagaagcgcaagattcccgaacccgctttcatggcccccataaagatgtaaaagagatgcattctgcaccaaggttttttcgtaaactttgcactggcggctgacataatcgtcaatccgcaggcgattctgaacacggcattgatgagactgatgtttggcttcaaggaaatccgctccttttacttaaaaaagttttttaaccgaaccttcaaaaatttgtaacgtttttatcgtgcgtgatgaggaaggatgtgataccatgagtctaatacatgtaaaggagagtatgtgaatgtccgaacgcacctttaactggaaaaacaaagacatcagggcacaggttgatgttgtagactcaaagctgcttccaacgctccttttacggaatgctctcgtcttaaatccatatgtaaaacaatggctgaaaaaaaacatttggatttatcaggaccgcattgtttatgtgggtcatgaacttccgaatagagccgaagaaattcatacgattgattgtgaaggaaaatacattgtgccaggttatattgaaccgcacgcacatccttttcaaatatataatccccaaacactggcggaatatgtgtctcaatacggaacaacgacattcgtgaatgataacttatttttgcttttgcaaagcggaaaaaagaaagcgcttacgattttgaatgaactcaaaaagcagcctgtccagtatttttggtggtcacgctatgacctccagaccgaggttctgaacgaggaccacgtccttccatttgacgtcagaaaacagtggattgaacatccggatgtgattcaaggcggagaaatgaccgggtggcctcgcttggtagatggtgatgatttaatgctccactgcatgcaagctacaaagaaacagcgaaaacgcattgaagggcattttcccggcgcttctgataaaacgcttacaaaaatgaagctgttcggtgcggattgtgatcatgaagcgatgacaggtgatgaagtgatgagaaggctggaactgggctattatgtttcccttcggaactcttccattcgtcccgatgtaagaaaaatcttgcaagagctgcatgagaagggcttccgctattatgaccacttcttttacacgacagatggcgcaactccgaatttctataaaggcggcatgacaaacgagctgattcgtatcgcgttagaagaaggcgtacctgcaatcgacgcctacaatatggcatcatttaatatcgcaaagtattaccaaatggatgattatttaggagttgtcggaccgggtagactggcatcgctgaacatattggaagatccgttaaatccgaatcccgtgactgttctgtcaaaagggaccattctgcgtgaagacggctgtgatttgaaggcgtttacaaagacggactggcacaaaggcggtcttgtcccgcttgaactttcatatgatatgacgatggatgacttgcagttttctatgccgatgggcgtgaaaatgcggaatgcggttattatggagccgtatatgattgagattgacaattcgatggaacagctctcgtttgaccatgatgaaagttatttgacgatgctcgacagacacgggaaatggcgcgtcaatacgatgataaaagggtttgcctcaagcgtgcagggatttgtaagctcctttacgacgacgggcgacattgtcgcgattggaaaaaataaagcggatatgctgctcgctttcgcccggatgaaagaaatcggaggaggaattgttttagcggagaacggaaacattttgcatgaaatcccgcttgcgctgtgcggctgcgcctcttcggaagcgtatgaagacgtgcttgagaaggaacaaaagctgagagatcttttgactgaaagaggctatgagttttccgatcctatctatacgctgctctttttgcaaagtacgcaccttccgtatatacgcattacgccaagaggaatcttcgacgtcatgaaaaaaactgtactctttccatcgataatgcgttaaaatataaaagagcagggagccgacatatgaaaaaatggatgacagtttgcgcgctgtgtttcgtgttttttctgctggtatcctgccagcagaaggatgctgtcccggatactgcaaagaagctgaaagctcctttaacggggctaaagactgaacagaaggcgactgaacgccggcctgttgctgttgtggtgaacaatcacccgaaggcgaggccgcagtcgggtctgtctaaagccgacattgtcatagaagcgctagccgaagggcaaatcacaagatttctggccattttccaaagccagatgcctgaaactgtcggacctgtgcggagcgcgcgggaatatttcgtcactctcagcaatggctttgacagcatatttgtccatcacggctggagtcccggcgccaaaaagcagctggaatccggagctgccgattatatgaacggattggattttgacggaagcttattttggagagctgatttcagcaaaccgccccacaattcctatacgtcttatgattacataaaaaaggcggcagaacaaaagggttataagctgaagcaggaaacaaatccgctgctgtttcaaacatcagatgcaaaacctgcaaatgaatcttacaatgttcgggtagattatggaacaaaaaacgttacaaatcttgtcgaatacaactatgataaaaaagctgaatcttatacaagaagctctgatggtgtcataacgacagaccgggaaaccggaaagccggttgcaatgcaaaatattttcattgttgaagccagccatcatattattgatcaagatggaaggcgggacatcgacttggaatcaggaggaaaaggtctgttgtttcagcacggaaacgtcattgaaacagactggaaacaagtgaatggcagaattgtgccgataaaagacggcaagtggcttccgtttgtgccaggaaagacttggatcaatatcgtacctgatcttgatgcggcttccattagtaaaggagaaggtgtgtaacgatgcaaatcgataaattacgcggcaaagagctggaccagttatttaactcgatcttatcgctgaaagacctggaggaatgttaccgattcttcgatgatctatgcacaattaacgaaattcaatcgctggctcagcgccttgaagtggcgcgcatgcttcgcgaaggaaacacgtatcataagattgaaacagaaacaggcgcttccacggctacgatttcccgtgtgaaacgctgcttaaattacgggaatgacgcttatgaaatggcgcttgaccgtgtgaaggagacggaaactgagtcttcttcaaaataataaacaaccgccctgccgttcggcaagggcggtttctttatgaaacaaattgatggatcaggttgtcgatatcgatgagactgccatcctctttccgatagacaacatgctccttggaaaagtgaatcggcgaattgatccctgctgcggctgcaaggttaaatagtccctcgcgcaatgaaataacgtagttgcagacacgatgctgtttttcctcaacgctcaatgctttttgcaatttcggatctgtcgtcgccacacctgccggacaggtgttggtgtggcagacgagagcgcggatgcagccaacggaaaacatcatgccgcgtgcgatgttgacaaagtcagcgccgagggctaaggcgaccgcgattttatcaggagtcaggagctttccggaagcaaagattttcagcttgctgcgcaagccgtattgtttaagaagcgtgtcaacaataggcagcgctgtcataatcggaagaccgactgtatccgcgagctcgtaaaaggaagctccggtaccgccttcacttccgtcgatcgtgataaaatccggctgctttccgcttttctgcatatgagagaaaagctcatgcaattcttcaggatgccctgcgaccagtttgatgccgactggcttttgtccgacatctctaagtttttcaataaagtcgagcatttcaggagggtttgagaattcataaaagcggttcgggctgtcaatcgactttccaggttcgacattccgaatgtctgccacttcctctgatactttggcgccatccacatggccgccccgggttttcgctccttgtgccagctttagctcaaacgctttaatctggtcaatcctgctttttcttttaaattcctcccatgaaaattctccgtttcttttgcgcacgccgaataggcccggaccgatttggcaaatgatatcggcgccgccctttaagtgatactcagacaatcctccttcacctgtattcatccaggttccgcctgcctgatggagcccttttgagagcgccgtaacagcccgttctccaagagaaccgtagctcatggcagactggccgactaatcccttcacataaaatggcttctcgcatgtatgctcgccaatcacctgtacatcatcaggatggagaaaatacgggtctgccttgatatgttcggcatgctccttgcgtttgaatagattgtcagcatccattttatagatttgggtttcaatttttggcgtttgattgacgtgcatttcttccctttgttttggaaacatagcgttacggatataatagccaggtttatcaaaatctcttacagatccaaagcccatcattctgcttttgtatttgccggagatgacggtttgctcatattcctttcgtgaaaaaggctgctcctcattgtcattgctgtataaatactgtctgagctccggcccgattttttcaaggatataccgaaaccttccgatgacgggatagttgcgaagaattgagtgctcctgctgtttttcatcctttatgtagatccaggcaaacaagacgatcgggatagcgatgatccctatgataaatgcgatgagtgctattatgatggtttccatctctcagcctccctttttatgtaaccatttccacagttgaacactttccaaacaatagcagaaggaatctggtgaaaaatgtgtgcttctgccgatacaggactcagagagcaggtactgccatatgctctttttttatgaaaatagaatcaaaacacctttttcagtgaataacgagattaacggctttttccgtttttccgcgctatgtgaatttgttataatgtttaaatggtaacaaacgaatggaggaacgtatgacgtgtacgatgtaacggagtggaagcatgtttttaaactcgatccaaataaagatttgcctgacgaacagctggagattctttgcgaatcaggaacggatgcggtcattatcggaggcagcgatggtgtgacagaggataatgtcctgcggatgatgtctaaggtaagacggtttttggtgccgtgtgtccttgaggtatcagcgattgaagcgatcgttcccggctttgacttatattttattccgagtgtattaaacagcaaaaacgcggattggattgtcggaatgcaccagaaagccatgaaggaatacggagaactgatgtctatggaagaaatcgtggcggagggctactgcatcgcaaatccagattgcaaagccgcggcactgactgaagcggacgccgatctgaatatggatgatattgtcgcctatgcgcgtgtgtcggagctgctgcaactgccgattttttatttagaatacagcggcgtgcttggagacatagaagctgtcaagaaaacgaaggctgtattggaaacgtccaccttgttttacggcggcggcatcaaggatgcggaaacagccaagcagtacgcagagcatgcggacgtgatcgttgtaggcaatgctgtgtatgaagattttgacagggctttgaaaacagtagcggctgtgaaaggcgagtagtaaattgtacggatttggtttatgatagaacatatgttttgtataggcgggtgaacaaattttgaattatattagcaatcaattactaagcggtttaaaccccgttcagcaggaagcagtcaaaacaacggacgggcctcttttgctgatggcgggagcgggaagcggaaagacgcgtgtcctgacccatagaattgcttatttaatggcagaaaagcatgtggcgccgtggaacattctggcgatcacatttacaaataaagcggcacgcgaaatgaaagaacgtgtggaaagcatcctcggacccggcgcggacgatatctggatttccacattccacagcatgtgcgtgcggatcttgcgcagagatatcgaccggattgggatcaaccgaaatttctccatccttgatacggctgaccagctttcagtgatcaaggggattttgaaggagcgcaatcttgatccgaagaagtttgacccgagaagcatcctcggcacgatcagcagtgcgaaaaacgaattgaccgaaccggaggaattctctaaggttgccggcggctactacgatcaggtggtcagcgatgtatatgctgattatcagaagaagctattgaaaaaccagtcgctcgattttgacgatttgattatgacgacgattaaactgtttgaccgagtgccggaagtgcttgaattttatcagcgcaaattccagtacatccatgttgatgagtatcaggatacgaacagggcgcaatacatgctcgttaagcagcttgccgagcgtttccagaacctttgcgttgtgggggattctgatcagtcaatctacagatggcgcggcgcggatatcaccaacatcctttcatttgaaaaagattatccgaatgcaagcgtgattttgctagaacaaaactatcgttcaacgaaacggattttgcgcgcggcaaacgaggtcattaaaaacaactctaaccgcaaaccgaaaaatttgtggacggaaaacgatgaaggcatcaaaatttcctattatcgcggtgataatgaattcggagaaggacagtttgtggccggtaaaattcatcagcttcacagctcaggcaagcggaagctgtctgatatcgccatattataccggacaaacgcgcagtcccgtgtgattgaggaaacgcttctcaaagcgggcttgaactataacattgtcggcggcacaaagttctatgacagaaaagaaattaaagacattcttgcgtacctgcgcctcgtatccaatccggatgacgatatcagtttcacgcgcattgtcaatgtgccgaagcgcggagtcggcgcgacatcacttgaaaaaatcgcttcgtatgcggccataaacggcttgtcatttttccaagcgattcagcaggttgattttatcggcgtcagtgccaaagcggcaaacgcgcttgacagctttagacagatgattgagaatctgaccaatatgcaggattacttatccattacagagctgacagaagaaattcttgataagacggaatacagagaaatgctgaaggctgagaaatcgatcgaagcccaaagccgtttagaaaatatcgacgagttcctgtctgttacgaaaaactttgaacagaaaagtgaagacaagacactcgttgcgttcctgacagacttggcattgatcgcagatattgatcagctcgatcagaaggaggaagagtcaggcggcaaggatgcgatcaccctgatgacactgcacgccgcgaaaggactggagttcccggttgttttcttgatggggcttgaagaaggcgtcttcccgcatagccgttcactcatggaggaagcggaaatggaagaagaacgccgccttgcgtacgttgggattacaagggcggaacaggagctttatctgaccaatgccaaaatgcgcaccttgtttggccggacaaatatgaacccggaatctcgcttcattgctgaaataccggatgatttattggaaaacctaaatgagaaaaaagaaacaagagcgacgtctgcgagaaaaatacagccgagacgcggccctgtttcacgcccggtatcctacgccagcaaaacaggcggcgacaccttgaactgggcagtcggagataaggcgggccataaaaaatggggaacaggaactgtcgtcagcgtgaaaggcgaaggagaagggacggagctcgatattgccttcccgagccctgtcggcgtgaaacgcctgttagcagcatttgctcctattgaaaagcagtaattgaagaggaaaggaagaagcagatggacaaagaaacagcgaagcagcgggcagaagaactgcgccgcaccatcaacaagtatagctatgaatattacaccttagatgaaccgagcgtcccagatgccgaatacgacagattgatgcaggagctgattgcgatcgaggatgagcacccagacctcagaacgcctgactctcctacgcagcgcgtcggcggagccgtgcttgaagcgtttcagaaagtcacccacggcacaccgatgctcagtctgggcaacgcctttaatgctgatgatcttcgtgatttcgaccgccgtgtgcgccaagccgtcggcgacgatgtggcgtataatgtggagctgaaaatagacggtcttgctgtttctctccgttatgaagacggctattttgtcagaggggccacaagaggtgacggaacgacgggagaggatattacggagaacctgaagacgatccgcaatatcccccttaaaatgaaccgtgagctgtcaatcgaagtgcgcggagaggcgtatatgccgaaacgttcgtttgaagcactcaatgaggaacgaattaaaaatgaggaagaaccgttcgctaatccgcgaaatgccgcggcgggatcacttagacagcttgatccgaaaattgcagcgaaacgaaacctcgatatcttcgtctacagtatagcggagcttgacgagatgggtgtggagacgcaaagccaggggcttgattttctcgacgaactcggatttaaaacgaatcaggaacgaaaaaaatgcggcagcatagaagaagtcatagtgctgatcgatgagtttcaggcgaagcgcgcagacctgccgtatgaaatagacggcattgtcattaaagtcgattctctcgatcaacaggaggagctcggttttacggcgaaaagcccgcgctgggccatcgcgtataagtttcctgctgaagaggtcgtgacgaagcttcttgatatcgaattaaatgtcggcagaacgggtgtgatcacgccgaccgcgattcttgagccggtaaaagttgccggcacaacggtctcaagagcatcccttcataacgaagatttaattaaagagaaggacattcggattttggataaggttgtcgtcaaaaaagcgggcgatatcatcccggaagttgtgaatgtcctcgttgaacagcgcacaggagaagaaaaggaattcagcatgccgacggaatgtcctgaatgcggcagtgagctcgtccggatcgaaggagaagtggcgcttcgctgcattaaccctgaatgtccggcgcaaatccgggaagggctgatccatttcgtttcccggaatgccatgaacattgacgggctcggcgaacgagtgattacacagctgtttgaggaaaaccttgtccgcaatgtggcagatttatataagctgacgaaggaacgagtcatccagctcgagcgcatgggtgaaaagtccactgaaaacctgatcagctccatccaaaaatcaaaagaaaattcgttagagcgcctgctgtttgggcttggcatccgttttatcggatcaaaggccgcaaagacgctcgccatgcattttgaaagcttggagaacctgaaaaaagcctctaaagaggaacttctcgcggtagatgaaatcggtgaaaaaatggctgatgctgtgatcacctattttcataaagaagaaatgcttgaactcttgaatgaacttcaggagctgggcgtaaacacgctctacaaaggcccgaaaaaagtaaaagcagaggacagcgactcttactttgccggtaaaacaattgttctgacaggaaagctggaagagctgtcaagaaacgaagccaaagcgcaaatcgaagcgctgggcggaaagctgactggaagcgtcagcaaaaacacagacttagtcatcgccggagaagcagcgggaagcaagctgacaaaagcacaagagctgaacattgaagtgtggaatgaagaacagttaatgggagagctaaagaaataagaggagtgttttctattgaaaaagacgttggcattggcggcaacggcggcagtattaatgctgtctgcctgctcgtcaggtttcgggggggagaaggaggaagagattacgcaaaagacggcgaaatcgtcagaaaaagcgattgtcccgaaatataatatctctgactcctattacaaaatggtgctgccgtttaaggcaggcaaagcgcgcggcttaacaacggaacagctgaatactaggctggacattgacgagtttgaaacagggctgatgcgtcttgcccaagattctttctcgactgacgattatctgttccaagaaggacaatatttagatgaggatacagtattaagctggctggcacggaaaaaaacgggctctgatttgaaaaaagccgaaaaagaagataaaaacttcaaaaatgaaggcttgaacccggcgctcccgagctctggttcaacagaagaaaagaacgaaagcagcccgatttatttagcatccatgcttgagcacgattatttagtcagaaaagacaagaattctatccagcttggcggcgtcatgatcggactggcgttaaactcagtgtattactatcgtgaaaaaactggcgacccgcaaaaagaagtggagattaaagacagcacgcttcgccagcagggagaaaaaattgcacaggaggttattaaccgcctccgcaaaaaagataacttgaagaatgtgccgattaccgtcgcgctctacaagcaggcgtcaaaaacatcgattgtgccggggaacttcatcgccaaaacagaggtcaaagcaggctctactgatatctcaaattgggatgacatcaatgaaaaatatgtattctatccggcggatacaaccacagcagaaaagtacccggatgacaccgaggtctttaagcggttcaaaaactcaattgaagaatatttcccaaactatacaggcgttgtcggtacagcgctgtatgaaaatgatgaaatgaagaaaatgaagattgacataccaatgcaattctatggaaaaagtgaagttgtcgcgtttacccagttcttaacgggtgaagtgatggactactactctaagagctcagttgatgtcgaagtcaatatcacgtcctcagacggacaggaagcggtcattatccgcaatgccggagataaagagccgactgttcacatttatgactgatagaaaacccttgtgccatattggcacaagggtttttatgttacaattaacaggaaaagggaaaatgtttccgcttctgccgaaacacaaatcaaggggaggtatgttgatgctggaaatcgtgtgaaaacaatcattatcaaatctatagcaatgaaaggatgttagacgtgcataaagatatcaaaaaaatatttcatgaagagcaggttttggcagaagctgcagcgagatacggtttctcaaaagatcaggtgcgttttctggctgatgcggaaaactatgtatatgaatgtatgaaagacaatcaaccttatattttaaagattacccatacgattcggagatcttctgattatataatgggagagatggaatggctccgtcaccttgcaatagggggaatttcagtagccaaaccgctcccgtcgctgaacggaaaagacgtagaagcagtgccggacggaaacggcgggtcatttttattgagagtgtatgagaaagcgccggggcaaaaagtggatgaatcggactggaatgaaacgctattttatgagcttggcagatacacaggcagcatgcacagcctgacaaaaagctacaaattgagcaatcccgctttcaaaagacaggaatgggatgaagaggagcaattaaagctgagaaaatatgtgcctgaagatcagataaaggtgtttcagcaagccgattctttgatgaatgaactgcggaggctcccgaaaagccaggacagctacggcttggtgcatgcggatctgcaccatggcaattttaactgggatcatggcaaaatcacggcatttgattttgatgatatcggctacaattggtttgttaacgatattagcattcttctctacaatgtcctgtggtatcctgttgtgccatatgatgataaagctgcgtttacagaagaatttatgacgcattttatgaaagggtactgggaggaaaatgagtttgaccctgcatggctgatgataatacctgatttcctccgccttcgccatatgctgatttacggattgctgcatcagatgtttgaccttaacacaataggagaagaggaaaaagaaatgctggccggtttcagaagagatatagagaatggcacgccgattacagcatttgatttttcagcactggtgtagatagaaaaagccaatgggattccagtcccattggcttttataatgtatcacacttcacgccgactacgccttcaatggctttaatgtcatagtagacatcggtcgtgtatctgtttttatggacgcggaccttcacttccacaattggaaaatccttttcgcccaggtcgtcgatccgaacggagtgtgctttgatatctcttcttttcatttcttttaaaatctctgtcattttgtctttatcagaaagtgacattctgatgcggatgtctttttcctgcaggcggtcggggccgatttttctgaccacccatgggagaaattccacgctgatcaggatgaacagaagactggcaaacgcttctttataaaaaccggctcccgtagcaagcccgagccccgctgccccccagatcatggccgatgtcgtcaggccggaaatgacatcattgctttttcgcaggatgacaccggcgccgataaacccgacgccggagatgatttgtgccggcagacgaagcggatccatcatgatgcggtagtatttagggaaatgatatgccgcattaatactgacgatcgtcagcatgcatgagctgactgcgatgacaatacaggtttttaatccgagcggcttattttttaattcgcgttcaagcccgatgaccatgccaatcaatgtggcaatgcccaatttcaataaaatatcaggatcaatataccagctcaacagcaaacttcccccttctctatggtgtttttaaataaatatgattttctcacagtatttatagcaaaacaagagcacaaaagccaccaagctgcgcttgatggcttattgcttactttttgcgttttaacagcttttccatgacaccgaataatcggtaagaggcttttgcaggacgttttgtgatcatgctgacaatgatgccggcaatcatactgagaataaacccagggatgatttcgtacacaccggttgattttgccaggccggttgtaatccagatcaacacggtcgcagccccgacaatcatggcagcaagcgcgccccattcgttcattcgtttccaatacagactgagcagaatcgcaggcccgaaagctgaaccgaagccggcccaagcgtatccgaccaaatcaagaatggtgctgttcgggttcaatgacaagagtaccgcgataacggcaatgactaagacggacaatcgcccgatcatgaccaattctttatcagaagcttttcgtctgaaaaatgaccggtataaatcctctgttacagcacttgctgtgaccaagagctgtgaggaaatcgaactcatgatggcagccaaaatagctgacaataagaaccctgtaattaatgggtggaacaagattttagagaagataatgaaaatcatctccggatcttttacagcaactccgaatttatgggcgtatgcaacaccgattaaacccgtcagcacggaacctagaactgtaatgatcatccagctcatgccgattcggcgtgcaggttttaaatctttaatgtctttaatggccataaatcggacgatgatatgaggctggccgtagtagcccaacccccaggctaaataggaaataatgctaatgacgctcgcgcctttaaaaatatccaataaatgtggattaacagcgtcgatttcatggaaagtcggagcaacgccgcccacatgggtaaaagcaacgatcggcacaagcactagtgctgcaaacatgatcgcaccctgcacgaagtcagtcagactgacagcaaggaaaccgccaaacagtgtgtataacacgacaactgcggtggtcagaaacaggcctaatttgtaatccgcaccaaaagcagattcaaacagccgtccgccagataccataccggaagaggtatacaatgtgaaaaagatcatgatgatcaatgcagatacgattttcagcagtgatgaagaatgctggaatcgtttatcaaagaaatcaggaattgtaatcgcatcatctgccgcttctgtataagcacgcagccttggagccagcagcaagtaatttgagtacgccccgattgtaagacctaaagcaagccataaggtggacagccctgtcgcaaacatcgcgccgggaacacccatcagcatccatccgctcatatcggccgcgccggcagacaaagcagtaacgaatggtccgaggcctcttcctccaagcatgtaatcattgatgtcagtggttttcttgaatgcataccagccgattaacagcatggcaataaagtaaattcctaaagatataataatttcaatactcacgttttaccctctcttcatttctaataatgttgcatcacctctcaaattgatggtgccagttaagcagcctggcgtaagtgcaaaacaaaagaaattcttttgcgggtgcacttggtaacttaacctaacaaagtattcccggccattcaagcgatgaaacattgatcataagctggaaataccgttgcaaacctagaagggaataaagaataaaacgctttcaagaaataattaaagtaaaaatattcagaaaaatatttcgtttctccttctcctcattttagtataaaatatatagggtattgtttcgaaaacacaggcctgtctcaaggcgttttgttgctttaaagggcttgtttttgatatgatcagtattatatgacttaacggagaaatatgtggaggtggatcatatgtcacgaatttcaatagaagaagtaaagcacgttgcgcaccttgcaagacttgcgattactgaagaagaagcaaaaatgttcactgaacagctcgacagtatcatttcatttgccgaggagcttaatgaggttaacacagacaatgtggagcctacaactcacgtgctgaaaatgaaaaatgtcatgagagaagatgaagcgggtaaaggtcttccggttgaggatgtcatgaaaaatgcgcctgaccataaagacggctatattcgtgtgccatcaattctggactaaaggagggacacaagaatgtcattatttgatcataaaatcacagaattaaaacagctcatacataaaaaagagattaagatttctgatctggttgacgaatcttataaacgcatccaagcggttgatgataaggtacaagcctttttggcattagatgaagaaagagcgcgcgcatacgcgaaggagcttgatgaggcggttgacggccgttctgagcacggtcttcttttcggtatgccgatcggcgtaaaagataatatcgtaacaaaagggctgcgcacaacatgctccagcaaaattctcgaaaactttgatccgatctatgacgctactgtcgttcagcgccttcaagacgctgaagcggtcacaatcggaaaactgaacatggacgaattcgccatgggatcatctacagaaaactcagcttacaagctgacgaaaaacccttggaacttagaaacagttcccggcggttcaagcggcggatctgcggctgcggttgctgcgggagaagttccgttttctcttggatctgacacaggcggctccatccgtcagccggcatctttctgcggcgttgtcggattaaaacctacatacggacgtgtatctcgttacggtctggtcgcatttgcgtcttcattagaccaaatcgggccgattacacgtacggttgaggataacgcgtttttacttcaagcgatttccggcgtagacaaaatggactccacgagtgcaaatgtggacgtgcctgattttctttcttcattaactggcgacatcaaaggactgaaaatcgccgttccgaaagaataccttggtgaaggtgtcggcaaagaagcgagagaatctgtcctggcagcgctgaaagtccttgaaggtctcggcgctacatgggaagaagtgtctcttccgcacagtaaatacgcgcttgcgacatattacctgctgtcatcttctgaagcgtcagcgaaccttgcacgctttgacggcatccgttacggctaccgcacagacaacgcggataacctgatcgacctttacaagcaaacgcgcgctgaaggtttcggaaatgaagtcaaacgccgcatcatgctcggaacgtttgctttaagctcaggctactacgatgcgtactacaaaaaagcgcaaaaagtgcgtacgttgattaagaaggatttcgaggacgtatttgaaaaatatgatgttattgttggaccgactacaccgacacctgcgtttaaaatcggtgaaaacacgaaggatccgctcacaatgtacgcaaacgatatcttaacgattccggtcaaccttgccggcgtaccgggaatcagcgtgccatgcggattagcagacggacttccgctcggcctgcaaatcatcggaaaacactttgatgaaagcactgtataccgcgttgctcatgcatttgaacaagcgacagaccatcataaagcaaaacctgaactgtaaggggtgaaaagaattgaactttgaaacggtaatcggacttgaagtccacgttgagttaaaaacaaaatcaaaaattttctcaagctctccaacgccattcggcgcggaggcgaatacgcagacaagcgttattgacctcggatatccgggcgtcctgcctgttctgaacaaagaagccgttgaattcgcaatgaaagccgctatggcgctcaactgtgagatcgcaacggatacgaagtttgaccgcaaaaactatttctatcctgacaacccgaaagcgtatcagatttctcaatttgataagccaatcggcgaaaacggctggatcgaaattgaagtcggcggcaaaacaaaacgcatcggcatcacgcgccttcatcttgaagaggatgccggaaaactgacgcatacgggcgacggctattctcttgttgacttcaaccgtcaaggaacgccgcttgttgagatcgtatcagagccggacatccgcacgccggaagaagcgtacgcatatcttgaaaagctgaaatccatcatccaatatacaggcgtttctgactgtaaaatggaagaaggctcacttcgctgtgacgccaatatctctcttcgtccgatcggccaagaggaattcggcacaaaaacagaattgaaaaacttgaactcctttgcgtttgttcaaaaaggccttgagcatgaagaaaaacgccaggagcaggttcttctttccggcggcgtcatccagcaagaaactcgccgttatgatgaagcaacgaagaaaaccattcttatgcgtgtcaaagagggatctgacgactaccgttacttcccagagccagatctagtcgagctctacattgatgatgaatggaaggaacgcgtaaaagcaagcattcctgagcttccggatgagcgccgcaagcgttatatcgaagagcttggcttgcctgcatatgacgcgatggttctgacgctgacaaaagaaatggctgatttcttcgaagaaaccgttcaaaaaggcgctgaagccaaacaagcgtctaactggctgatgggtgaagtgtcagcttacctaaacgctgagcaaaaagagcttgccgatgttgccctgacacctgaaggccttgccggcatgatcaaattgattgaaaaaggaaccatttcttctaagatcgcgaagaaagtgtttaaagaattgattgaaaaaggcggcgacgctgagaagattgtgaaagagaaaggccttgttcagatttctgacgaaggcgtgcttctgaagcttgtcactgaggcgcttgacaacaatcctcaatcaatcgaagactttaaaaacggaaaagaccgcgcgatcggcttcctagtcggacagattatgaaagcgtccaaaggacaagccaacccgccgatggtcaacaaaattctgcttgaagaaattaaaaaacgctaataaaaaagcagcccttagaggctgctttttttatagtcaaatcgagataaagacagagatgagggcccgaagcctttcaacttctttgtcgttggttccggtcaaattggacagcatgcctttaataatcggcttgcgcggtttatcctgagtcaattcttcctcgataacatcaagtgacacggtgatatcctcgggcagcgtgctgttttctttcactttctgaatgtcctcaagcagctggtcttttcccgcaggcatcgggttgaaaatgtcttttgatacaatcggattgagtgcagaacggctcagcccctgtacaagatcatccagtctctcaataataaaggctgagatttcttctgcatcgatattaagctcaccgttaaataccatcacgttcatataggaatgcacaatgcctcttgccatgatggacagatctgcgacataccgctcgattccttcgccataggataccagcaaggcgttccggtacagcttatccgtctccatggttactttgtaaaagtattgcttgatttcttgattttccggaatgatattttcagtaagcaaaagaacgataaaatctttatgatcgcgaaaatcctcaaattgagcgccaatttgcttttttaacacttccttaggcggctttccggcgagatcttcttctatatttttcattttgttcatagacataccgatataatattcacaggcagataacagcagcgcttctttcgatttgaagtgcaaataaaaagcgcccttcgaaatgccgcattcactggcgatttcttggatcgtcgtagctgcgaatcctttttttgcaaataaacgaatgctggtttttatgattctctcttttttttcattcatgacgtgcttccccttaatccttgaaaaatttagtaaaattttctggtatatgagttgacgttgttgcgttataacgtttagtattatatagaatgaccagtcagtcaataaaaaatgtaatggaggatatgatgaatcacgttattaatttcgttctgaaaaacaaattcgccgtatggctgatgacgattattgtaacggcagccggcttgtatgcgggtatgaatatgaagcaagagtctattcctgacgtgaacatgccttacttgacgatcagcacgacatatccgggtgcgacaccaagccaagtggctgatgaagtgaccaaaccggttgaacaagccgtgcagaacttggacggtgtcagtgttgtgacgtcgacgtcctatgaaaacgcatcgtcggtcatgattgaatatgattatgagaaagatatggacaaagcgaaaacagaagcagctgaagcgttagaaaacgtcaacctgcctgatgacgcgaaggatccggagatttcacgctacagcttgaattcattcccgattctgacgctgagcgtgtccagtgataaagataatctacaagagctgacgaaacaagtggaggacagcctcgtttctaaacttgaaggcatagaaggcgttgcgtccgtccaagtatcaggccagcaggtggaagaggttgaattctctttcaaagaagacaaactgaaggaatacggccttgatgaagatacagtcaagcaagtgattcaaggttcagatgtgacaactccgcttggattgtacacattcggaaatgaagaaaaatctgtcgtcgtcagcggcgatattgaaacaattaaagatttgaagaatatgagaatcccgacggcatctgcttcaagtgcaggcagcagcgcagcatctcaagcgggtgcgcagagtgctcaagcagcccaaagcgcacaagcggcagcacaggcgcagcaaagcgcaagcacagcagtgccgacggtcaagctttctgacattgccacaattaaagatgtgaaaaaagctgaatccgtttcacgcacaaatggcaaagacagcatcggcatcaacatcgtcaaagcaaacgatgcgaatacggtagaggttgccgacaatgtcaaagctgagctgaagaagttcaaagaagaccataaaggcttcaattacagcgcaactctcgacatggcggatccgatcacacagtcagttgacacgatgttaagcaaagctatcttcggtgctatttttgcgattgtgattattctcttattcttaagagatatcaaatcaacattaatttcggtagtttcaattccattatcattgctgatcgcactccttgtgctgcagcagcttgatatcacattgaatattatgacgctcggcgcaatgaccgttgccataggacgtgtagtcgatgactccatcgttgtgatcgagaacatttaccgccgcatgagactcaaagatgagccgctccgcggaaaagccttggttcgtgaagcgacgaaggaaatgtttaaaccgatcatgtcatcaacgattgtgacaatcgcggtattcctgccgctcgcacttgtaggcggacaaatcggtgaattgtttattccatttgccttaacgattgtttttgcgcttgccgcatccctggtgatttcaatcacgcttgtgccgatgctcgcacacagcctgttcaaaaaatcattaacgggcgcgccgattaaagcgaaagaacacaaacctggcagacttgcaaacatctataaaaaagtattgaactgggcgctgagccacaaatggatcacgtctatcatcgctgttctgatgctccttggaagcttgttcctcgtaccgttaatcggtgccagctacctgccgtccgaggaagaaaaaacgatgcagctcacatacagcccagaaccgggtgaaacgaaaaaagaagccgaaaatgaagctgaaaaagcggaaaaaatcctgcttgaccgcaagcatgtcgatacggttcagtattcattaggctctggcagcccgcttgccggaggagattctaacggcgcgttattctatatcaaatatgaaagcgacacacctgactttgataaagaaaaagataacgttctgaaggaaatccaaaagcaatctgaccgcggagaatggaagtcacaggacttcagctcttcaggcaataacaacgaattaacatactatgtgtatggtgattctgaaaacgatattaaagacacggtcaaagacattgaaaaaatcatgaaagatgaaaaggatctgaaaaacgtaaattcaggcctttccagcacatatgatgagtacacatttgtcgctgaccaagaaaaactaagcaagctcggtttaaccgcgtctcaaatttctcaggccttaatgtcacaaacatcgcaagaaccgctcacaacagtgaaaaaagacggcaaagagcttgatgtgaacattaagacagaaaaagacgagtataagagtgtgaaagatttagagaataaaaagatcacttccgcgactggccaggaagtcaaaatcggcgatgtggcaaaagtgaaggaaggatcaacatcagataccgtgtcaaaacgtgacggaaaagtctatgcagatgtcacaggtgaggttacctctgacaacgtcacagccgtatcagctgctatccagaagaaaatcgataagcttgaccatcctgataacgtatcgattgacacaggcggcgtatcagcggatatcgctgattccttcacgaagctcggtttagcgatgctggcagcaatagcgatcgtttaccttgtgctcgtgattaccttcggtggagcactagcgccatttgcgattctgttctcattgccgttcacagtcatcggtgcactggtcggactttacgtatcaggtgaaacgatcagtctgaacgccatgatcggtatgctcatgctgatcggtatcgttgtcacgaatgccattgtcttaattgaccgcgtgattcataaggaagcggaaggcctgtctacgagagaagcgctcctggaagccggctctacacgactccgtccgatcctgatgacagccattgcgacaatcggcgccttgattccattagcactcggcttcgaaggcggaagccaggtcatttcaaaaggactcggcgtcacggttatcggtggtttaatcagttcaacgcttctgacactcttgatcgtgccaatcgtatatgaagtattggcgaagttccgcaagaaaaaaccgggaacggaagaagagtaaaaaaactaaaagcctcagctctgctgaggctttcagcttgttgaaaaaccctcgcattcgttgtcaggtctgcgcgtcggtgctcacgaattctacattcgctccgctccaatgctcccccttcctagactacaagggttttcaatcaagctgaaagaatgttaaggatgacaaaagctcaaaacaagaatcagttttgagcttttgtgcgttttcacctgtaagattatgtacattttgttgcgatttttttaactcatagtataattaaaggttgttagtgtaaaaatggatcggatactcttaagtaggatgatgagataatgaaacgtgcacgcataatatacaatccgacttcgggacgggagatctttaaaaagcatcttgcccaggtcctgcaaaaatttgaacaagccggctatgaaacctccacccatgcgacgacatgcgcaggagacgctacacacgctgccaaggaagcggcattgcgtgagtttgacctgatcattgcggcaggcggagacggaacgatcaacgaggtcgtcaacgggcttgcgcctttagacaaccgtccgacactcggtgtgattcctgtcggcaccacgaacgacttcgccagagcgctcggcattccgcgagaggatattttaaaagcggcagatacggtcattaacggcgtcgcccgcccgattgatatcggacaggtcaacggccagtattttatcaatatcgccggaggaggccgtctgacagagctgacgtacgacgtgccaagcaaactcaaaacaatgctaggccagcttgcttattatttaaaaggaatggaaatgctgccttcacttcgtccgacagaagtcgagattgaatatgacggcaagctgtttcaaggtgaaatcatgctgtttttggtcacgctgacaaattccgtcggcgggttcgaaaagctcgcgccggattccagcctgaatgacggcatgtttgatttgatgatactaaagaaagcaaaccttgctgaatttatcagggtcgcaacgatggcgctccgcggcgaacacatcaacgaccagcacattatttatacaaaagcgaaccgcgtgaaagtcaatgtatcagaaaagatgcagctgaacctggacggcgagtacggcggcatgctaccgggcgaattcgtgaatctgtaccgacacattcacgtcgtcatgccgaaggagaaagcggaacagctggatgactaaaaacttggctttaataggccaagtttttctttcgcttaaaacaagaggtgaacatacatgaaaatgaaacccccagtagaaaaaaacgaatactacgacgtgacatttgaagatttgacacatgaaggagcgggcgtcgcaaaggtgcagggcttcccgatcttcgtgccgaacgccctgccggaggaaaaagcccagatcaaagtcacacgcgtcaaaaaagggttcgccttcggccgcctgatcgagctgaaggaagaaagcccgcacagaacagatgccccatgcccaatttacaagcaatgcggcggctgccagctccagcacatgacctacgaaggccagctcctgtttaaacagaaacaagtcaaagacgtcttagaacgcatcggcaagctggacctgtccaacgtcaccgtacacccgacactcggcatggaagacccgtggaactacagaaacaaagcacaggtgccggtaggagaacgggaaggcggactcgtcgcgggattctatcagcaaagaagccatgacatcatcgacatgagcgcctgcctgatccagcaatccaaaaacgacgaagccgtccaagccgtcaaagacatttgcgcaaactacggtgtcaaagcctacaacgaagaacgccacaaaggctggctccgccacattatggtcagatacggcgttgttacgggcgaaacgatgatcgtcttcatcacaagaacaaacgatttcccgcacaaagcgaagatcatcgaagacatcacagcgcaattcccgcacgtcaaatccatcgtgcaaaacatcaacccaaacaaaacaaacgtcatttttggcaacgaaacaaacgtcatctggggcgaagaatacatctacgacctcatcggagacgtcaaattcgccatctccgccagatcgttctatcaggtcaacccggagcaaacaaaagtgctctacgacaaagcgcttgagtacgcagagctgcaaggagaagaaaccgtcatcgacgcctactgcggcatcggaacgatttctctatttctggcgaagcaagcgaaaaaagtgtacggcgtagaaattgtaccggaagcgattgaagatgcgaaacgaaacgctgaattaaacggcatcacaaacgctgagttcgcggtcggtgaagcggaaaccgtgataccaaagtggtacgaagaaggcattacagcagatacgctagttgtcgacccgccaagaaaaggctgtgacgaagccctcatgcggacaattgtggagatgaaaccgaagcgggtggtgtatgtgtcctgtaatcctggaacacttgcaagagatttgcgagtgcttgaggatggcgggtatcagacgctcgaagtgcagcctgtggatatgtttccgcatacgaatcatgtggagtgtgttgtcttgatgtcacgggtggagaaatagggtctattcaaagcattgataaataaagggttttcgagattgggaaacattctgccggttgtgcggaggatattctgagtctcgaaaacccttgtttttatttattaagtaaacatatcgactgtggaaatcggcagagggttgaggagataggatggataattttgtagggtgtggagataggatagatgtaataaataacaaatgtcctaactatatgtgtttgatttgatagatggcattgaaataataattatttaatataaacagtatgtatcaatgctaattcatatctattaccattaaaccatatttaatattgagattttatattaaaatatttatattcataggtttttatgttataatagattactataattattatcaccagtttgatatccgaggtgaaagaaatgaatgagatgaatgaaaaatggtcaaaccttgaggaaatttcagagtatttaggtgttacaaaagatacaattcgaaattggataaaaaaaaccgatatccctgctcataaaattggtcggcagtggaagtttaaactttcagaagttgatgaatgggtcaagagtggaaaaagtgcgatagaataagttttggaaggaagagctttatggcagaaatacgtttatacaacggtgattgtatcgaaacgatgaagcaactagacgatgcatctgttgatttgataataaccgatcccccatataatttagggaattttatgaaaaatagagatactaatcttgtgaaaatgagagaaaacttttttggagcagctggttgggatgaccttgactttgatgattggcaaaagtcaatggacaacttttttatggagtctgctagggtattaaaaaagggtggttctatgattgtcttcatggcaattattaaagttgaaacgttgattaggcttgcagaaaaaagtggattttattataagactacaggtatttggcataagttaaatccaatgccacgaaatatgaacctccattttgtcaattcaactgaagcatggctatacttcacatataaaacacgtacaggtacatttaagaatgaagggcgtttaatacatgattttatagaaacctcaattacaccgaatggggagaaaaaatatggcaagcaccctactcaaaagccagaacaattaatggaacattttgtggaaattttatctattgagggtgatactgtcttggacccatttatgggaagcggaacaactggagtagctgcgaaaagacataatagaaactttattggaattgagttagataaagattattttaatgctgcatctaagcgtatcgaggaggtgccaaatgaagcctaaagtaatcgatttatttgcaggtgttggaggaatgtctttgggatttgaacaaatgggatttgatgtagtatttgcaaatgagtatgatgtctcaatagcagatgcctataaaataaaccatcctaataccgatatgttagtggccgatataacaactgtagattttgaagaaacattttcaaggtattttggggaaatagacgtcattatcggagggccaccatgtcaaggattttcgcagaagggtcagaggaaaacaattcatgatgaacgtaatttcctttttaaatcttttgtgagagttgttgagaaagtacgaccaaagtactttgttatggaaaatgtccccaatttacttactgctgaacgcgggtattttaagaaggaactagagaaactctttaatgacatgggttacgaattaaacatgggagtgttgaatgcgtcagattatggagtgccacaaaatagaagacgtgcgataattattggtaagcaaggagatgttgctccttcactcccaacaccacaagaaggtaaagtaacaatatgggatgcaataagtgatttagcttacttgaattctggcgagggatctgaaaagcaagaatatagaaacccgccacaaagttcttaccaagaaactttgagaaaagaatcaactattttatataatcacgttgcaactaatcattctgctttagctttagaaaggttgtcattgattccaccaaatagtggtaaggaggttcttccagaagagcacttaacaaaatctatttatagtggtacttggacccgtatgagaaaaaatgaagtatctgttaccattacgacacggtttgatacaccatcatcaggaaagtttacacatccttttttgaatcgtgcaattactgttcgtgaagcggctcgcatacagtctttcccagactcctttcactttgttggtgctaaaggatctcaaatgaaacaggtaggaaatgctgttccgcctttattagctaaagccattgctcaggttattatgaaagatatagaagtctataaggaggatactgcatatgcaaaggcctgaaaacatggaaatttatgaagatatagatttaaagcttggcattaagtcatctttgcccaacgttaaagccacacttgccctttttattttgatttggaagagtgaaggacgtccggcagaagtaaagtattcagttcaagatggtgattcaattcgtatttcggatgaactcatgaataagcttattgcatactcttcaccagtgtatagtgttcatggcgtttcggatgatcaatttcgtcaaacggtgaataacaatcaactactaaaatcacaaatggaagctcttattgtagcgtttgaactgtattggaaattgggcgaaattgtttttcaggataatactaagcttgttagttctgagagaacaggtggtgtgagatatccaaaagagatacattttactttgaatatggatattattgatgtagctatggctgtggcagaggagaaatataaggaagttttgcttaattggttgggattgaatgttgccacaagtgaacgagaagataaattgcttaagtccgtattaacggctttgtcagaaacagccgtatttaaacttgatgatagtggtcaagatgtaatttttaatcaagatagcatctatcgtaaacttttagctaccaccgaaccagtagacattaatggtgataaagaagccaagggttcattacgagttctgaaaacctcgctaaatgatggaactaatccatatttgaactattcgcgtggaacagttacttctacaaatgatccggatctaaaccttgctgattatcaaaaacgcgtttctacattcttgtctctaagtactacaaaaatcgtaggaattgatgagtatgaagaagtagagagtggggcagatgttgcacatgaatccaatgatgactatcttaccgattcttctaatgctgaattaataaaatataaaacaggatatcaaactgatttccaccataatagaattatctttggtgctccaggaacaggtaaaagttatactttaaatcgagataaggagaccttgcttaaaaatggtggcgagtacgagcgtgtgactttccatcccgactattcgtatgctaactttgtgggaacttacaagcctacgatggtggattcagtaaagaatctgattggaagcaaagatgagagggatgttttaactgttctgttggatgataaaacggctcaagaaaaatatgatttgctatatgaaaaatttaaagatggcgatttaactcgcttaccacttttactaggattatatagtgatgacaagtttaaaactaagaaaaaagatggctctgatgctagtggtgataatagcgttgaacgaaatcatggtcgtgcgattaggccatatgtaaatctgatttcaaataaacaacctgctagtgaaattgcatatgaatacgttcctggcccatttatgaggacgtatgttaaagcacttaaaaatgctcagtcagatagtcctaagccatttttattaattgttgaagaaatcaacagagcgaatgttgcagctgtatttggtgatatatttcagttattagaccgtgatgaggacaatgttagtgaatatgctattcaaacatctgaggatattaaaaaatatcttgctaaagaattaggaggtaatccacaagagtattctgaaatcaaaatcccagataatatgtttatatgggcaactatgaatagtgctgaccaaggagtattccctatggatactgcattcaaacgtagatgggacttcacttatttaggtattgatgatagcgaagaaaaaattgtaggtaaaactgttgaactaggtaaaggtgcaaacaagagaatagttgagtggaatgaattgcgtaaagcgataaatactgaacttctttcatataaagtgaatgaggataagttgcttggcccatattttctgtcaaagaaaatcgttcctgaaacggagcctattgacccaacaaagtttatcgccacatttaagagcaaagttatcatgtatttatttgatgacgcagcaaagcaaaaacgccagactctttttgatggttgtaatgataagacgacatactcttctatttgcaaagagtttgaggaaaagggtgtatttatctttgccaaaaatatcagcaataaattccctgctactgcacctacaaataaccttacaggggacggtgcagaatgatatcgaagtttgtccgagaacagaaaagatacaatcaaactgaattacaggacatctttcaatgctcggaagaaaaaacggtagatattattaagcgtttgaaagagtttggtgttctaaaggctgttaaagcaacggattctcaaaaaaatatgtcagaccttttggaagaggatattgaagttgcagatgtagagattggtgagaacgaatacctttatgtgtttactttcgttggtgtaataaccgttaggggttgtgtattaaaatgctatcctaaatatatcttaactaataatgatcccttaactgagttaaaaacaataataaaagttcttgaaaagtataatgccaaagagcaaatcattcgtatgtataatgataacagtgaaagtagtgctttcaacttgcttgctgttatgattttcttgctacatgactactacgaaaatggtgtatatacgaatacaaaagatataattgaaactaatggttcgggtgaaatactgtgggacaagacgataaatgagacctttacttatctcagtaataatcgaccatattacatagaactgtttacacaaaaacgtataaatgatgattttgattactttaaaaggctccatgaatctattataagtatttgctctagggaactaaaagatgcagatttgttggatttgtttgatatacttccggttgaagtgtctgatgaagaacttgatgactttggagaaaaagactatatactttaccgcatacaaaatgaattgaatttgcagtttaatacaagaaagcagttattactaaagacgttatacgcctatgttgcacatagtagcacacttgcagaaattgattgtttcactatgtttggtacaaacagttttaatttagtatgggaaaaggtgtgtgcggaagtactggacaatcaattacagactccactaggttcactgcctatttcgttatctgacggatataatccttatgacctgctcatttcattaatagaaaagccaaagtggaatggttataagcaagatggttctgaatttcaaaaggccgctagggaaaccctcgtcccagaccttgtgtcaatccataagatgaataactcacatcagttcattatatttgatgctaagtattataatattcaacttgagcatggaaaagaactacggggacaacctggaattggtgatattacaaagcagtacctatatcagttggcatataaaaattttgttaatgatcatggaattcacgatgttaaaaattgctttttgatgccaaccgaacaacatagcattattaataagggatacgtcaatatagaaatgttagatgctctcgggttacagaatatacaaataagacagttgcccgcagaattgatatactcgcactatttagcaaatgaaaaaatggatataggcttacttcatttataaaggggatgtgggggagtatggcaggtaatcgttcatttaaagaatatgtggcagaaagattctataataaaatgtttgctgccatacaggatttcaccgaagaaaactacgatggcttagacttacggctatacagagctcaaaacatcggcggcattgagttatcagatatagaagtaaagttcgtatctgttaatgacttaccggacatgaaaatagaatttgatgttgctgttgaagctgaattcgaagtccgtgaatcaaatcatagttatgatgaatcagaaaattgtcggcaatggtttatgctggaatgctcaggagatttagattgcaatttggatgactttacaatctccaatataactgagtatactagcaaaaataagcagccgaaacctatgtcagactcccttgtccctatcatccataaggaacaactagaatctgttgccacagacttccttagaagacattatcctgaagcattaaaaaacccaatggcagttgagccacaggtgttggcagaaaaaatgggccttacagtagaaatgagagagattacaaaggatttctctgtttttgggcagatatactttcacgactgtgatgcggatttttatgatgaagatagcgatgaaatggtacagacccgtgtgagtggccgtacaataatcgtggaccctaaagcttacttccttcgtaatctgggatcagtcaataatactattgtgcatgagcgtgttcattgggaccaacatagaaaagcatttgaattggagcggttatataatagtagtgccacacgaatcaagtgtcaggtagttgggggtataaaagacaataccagagatgcaactgactggatggaatggcaggcgaatgccctcgctccaaagatacaaatgccacttgccatgtttaaaatccaagcgttcaaatttattaagcaattcagttcagaactgggaacatctgaacttatagatgtaatggagccagttattgacgccttagcaacgttcttcagcgtatctcgggcagcagctaaaatctgaatgattgatgctggatatgaggaagcaatcggaacttttacttatatagatggtcgctacgtcaagcggcatagatttaagaagggtgcgcttgaaagaaatcagaccttttctataggtgcagaggatgctgctatccaaagcataaccaatccagaaatgtccgctttagttagggatggaagttatatatatgtggattcccactttgtgctaaatcatccgaaatatttaacacaggatatattcggacaaacggtacttacagactacgcacgaacccatatggaagagtgctgcttggttttcgagttatcagtcaaatctgggtgtagggaaagatactatactgaatgtttcctcaaccgtgataagacatcaaatatagattttgatataaagtattgtaatggttttgagtatgcggctccagaaaagaaggcccaattactagccgaaacaatagcggaagaaatgcgaatctataatgaattgccaaatagctataccagctctttcaaaatagtacgtgagtggaaaaaagtaacttataaagaattagcagagaaaatattggtcaacgagcgtaccataagacgaatcgttaatggtgaggaaccgggatctattaattacatagtattgatttgccttggacttcatctaccgccaaatattagcagtcatataattcgcaactcaccattctcattgaacttcaataacaatagtcatatttggtataactttgcattgactcacctatatgcaaaatcgatggatgagattagagcatttttacaaatacatggggcagagccattataaaagtttaatatattttgaaaaagcggacacgggatgtccgttttttagttgcaaaatatgtgagccattcatgaatccttttaagggtttgtgtatggctttttttttgttgtttttaggtgtttttgttgggaaaagcgtcattttgagcctgaaattaacgggcatgaggtgtccgccaaggctgtccaattctcacctacaataatgatagatgaaggaaaggtccttcgtagttagcaagaattagaccattcctcgtctacaaaaaaatatcaaatgcctgatttgcaataaggcaaaggatacatattgtaacgtttcagtccgtttaggattgttatgcgttgtaatagaagtaccttaccttgttgcgctcattttcaggacaaagggtctgtgtacttcgaggcatggtataagagccccactggaaaagacatattctattaacagagatatgtattcattacttttagattgctgtaaaagatatcaaaaaaacttaacacatattttcactctaaattgtcatcatgactttacagatagtgactatgttgcatttgatgaaaaaggatttgtaactagaattaaaataagaatcccgtctctatttcgggatgagtacgatagaatttgtgccccggcatatgacgatgaatatgaccagtatgcacttttagaccttattgagttctttgcacaaaatattaaggatatctcagaacgatggaataatgagagataccgaaactatcaaacgatagattgccataattcttcagatgtatttgaaaatttccaggagacattaaatgaaatatttactgagtcggggctactttatgaacttacagatgaaaaaattatagaaagaattgttgaaaacagtccacttacaacggaaattgaaaataattttgcagcagtacatgaggtaggcacaagagagttgttgaaagatgctgttgcattatataagacaccaaatccaacagcacgacaagattcagtggaaaagatatgggatgcgttagaacgtctaaaaacttactatacaacattagataagaagcattcatcagaaaaaatagtaaatgatatggcaaacggaaatgatgattttgccgatttgtttaataatgaatttaaggtattgacggacattggaaataaatatcgcatacggcatcatgaaactgataggattgatattactgatgtccgttattacgactatttttttcaatcgttgcttatcgctaattgcatcttgctatacaatatttgatgtaaaagaaatactgattatgtactattcctttgataaaggaaaattcgacaaaaccgtagatgtgttgttaggctgaaatgaaaatcaaactacatattcttacatttacaatgtgatgacaattgaataaagaagcagaaaccgtaattggaaaaatgaaaggtgatttaagatgtcgggtctattgactttctcggctttacccctaaggagattgataacctaaaaataaaattcaaccagatattcagatataacgcaaactaaaaggaaagggagggagtataacagcatgaatcaagcagaaggaacagaccgattcgttcttagaatgagtgttgctgacgatgggtttagcttttcatcttccatcgaaacagcattaatatctgcggaaactgaaattcagagtctgaaagagacaatcatgtcagttgagagtcttaaaccgaactgtgataagttggattatgcgttggctgcaagttcaggagttctctgtggcatcattgatattttcctggttggaaaacctggagagtcaccggctggagatgttactgataagtggtttgcaaatcggacaactgatttcgctaaactttgcggatgggaaggcaaaggaaatgattcactgtcatcagcaattggctttcttgaaaagaaatttaaaattccatatgatcagcgcggagccggtgatgctggaagtatagtatttgacttgaatccttcaaatcatcatttcaaatcacttggccataatccgactttgcttggtttgtttttttcgatattagatcagtttacaaatcaatcgcactttgtttccggaggagaactgatatctttacagaatgctgatggaaaatttgaacttcgcggcagtaatgttccagaaaaattattttgtgggttcgtcaactggtttggccatttgatttccgatatgtctggatcatccagcagtaaaggtcgaggtatgggaataccttctccgttttgggcatggacgaacgatattattgcaataaagagaaaactgaacattcccgtttcacagtttgacaacacaataaatgagctggctctgagcatatacaaagaaggatacgatatccgctttcaagccacccaggtcattccagtctttatcaatgaaatcattgtcaggttggtatatgcgataaggcgattggtaaaatacttcgcaacaacagggaaagaagaacgttcggcatccgctatgtggatagcttgtgagccattctcaaatcccaccgtaaaaagaatgcttacaatagcgcacggcaccttctgcatgatggatctcggcgatgcaacaatacgggccttcataaccggaggtggtaccttcaatgtgactgaatttttccttcggcttaacatagtgggggtggtccgtttcacgatttcattgtatggcgaagcaaagcgggtcattgtaatacgaaaagctgagtccgaagctcagtttgcaagaagagaaataaccatcgtagaaaactatctgagcggactctcattattatccgagttatacgatgataaggatcttgtagattttgttgatgactttaagaacagcgatatgtatgttcaggcattccagaaatctgtccgattggcagaactcagaaaggtccctgataataatatactcaggacaaaatccgatatagatttatattttgggggtaacagacaatgagcaagaaaaaatcgaggttaaaacttgcccaagagcaggcagaatcgactatcaagaaaacaaatgataaaattggcgagttgggcacacacacaagccagctttatgatgaattgaacaccatacaaaaactctttgacgatattagaaatgttccaggcgagaagcgattagagtatgaaaaactgaaaaaaattcgcctcaactggaaacagcaagcagaaaagattgaatcagattacaaaaatgccgtcgcaaaaaatgctggaaaaggtgctgctggtgtaggtgccggaatcgcaattacggcccttggtcctactgccgcaatgggaattgcgacaacattcggtattgcttcaacaggaacagccatctctacattgagtggcgcggcagctaccaacgcggccttagcttggttgggcggaggtgcgcttgcggccggtggtggaggaatggctgctggaaatgcattcctggcccttgccggacctgtcggttggacgattgcaggagttgcacttgtgtgcagcggacttctgatatggaaagggaaaagtgatcagaaccgacttgaggagattttcacccttatcagcaagcgtgatgttaaatcatacgagcttgctattgtagaaataaatgagcgtataagccgcattaaagatgaaagccaaaaactcaattttgcaagcgaaagaacaagagcatttggcttggactacaacttaatgacagaggcacagcaatatgaattgggttcttatgtaaatctgatgaattcctctactcaattgttggttaatccgataactggattgcaaccaaaatacgacataggtgatctgaaggaatacatagctttcagtaaaaagaagtttgatgataagcagaaatctttgattgtttctctctccaatctcttgtttaagataaatcttgatgaaaaagataagacactattatgggagtctttcaaaggaaacaagaagttcttgtcttcgatagaaatgccaaagaaggattttgagttttcaattattgaaacagtaactgatgctcttaagcataagtatcgtttagaaaaaggttgatagcaatattcagatactggggaaatacttgcctataaatgtttggagtgagccatttaaatcgacagagcagtagtgaacattctttatattttacgagtgtaatggatatgttcccgtctaccgatagcgccaaaaacaccatggatatgtttccgagaacagacatactcaaatgacatcaattctgtcctctcgagccatgcggagtgtgtggcgttgcttgaacttagagaaggcaactaacccttggggggtgttgccttttttgattgttataactggaaaggctaaacttcatggtttttcttgaataattttatagttagatcactaattttagatatatgccactcaagtgaggtcatcgttttgtggatttcaagcagaagttgatcagcatcttgaacatcaacattctatcaccttgtcacctatttcttcagaaaaagagacacagcctaagctgcgtcttgtccttaaccaagcgttctgttttctgcaatcgttatttccttgtcaaagatggctttgtctgctagggagttcgttgaatcgtttgcagctttgcttgtcatgtttctggatgccacgtttacttcattacccaaggaagaactgataaagcttacactgatcaaagcaattacagcgcacaaagtcagtttaaatttcatacaaacaatcccctctctgaatttgtttgcgggcatgaaccatctttttgaaacagataacagaatcatccatctgtccaatttcagtataaaactttgcggctaataatgccaactcttccatataaggatatccttgggatgtctctaatttgttgaaaatatttaataaaatggacgcttctcctttttggataaacagcgcctgtaatccttcaaacataattttaaatagattatcgtcgaatttacatgcgaagcgtacgccttttctgaaacaatccattgcttggtcttgtttatgttgaagaaaataaattaaggctaaatcgtggtaagcttgtgtcaagttgttgaaatttgattttttgaattggagtatcgattgctccatgtattttgctgctttcgtcaattcgctcattttaagataacaatttccgatattgaataaagcttggccgtaaatccgcttgtttttgctttcaagcagccgtgcgccttttagtgcctgttcgaggtgagggagcgccttttcatgactttctaaatcgtcgtagtttcctgcgattacaaaatggcattgtatgcggcggactgagtaaaggtcgtgcgttttataaatgttatacgcctgggaagaatagtgcatggatacgtgggtttgtttcatatgataaaacacttcagccattttaaaataaaattccgctcgctcaatttcatctgaatatagggaattgtgttttccgctttttgatagaatgtaatggcacttaagaaattgccctctttgaattcatacatcccttggaaaaagtaatagtagtattcaacgagtttctccatttttctgttgctgccttcaattctcttgaataatctgataactccatttagtttccttcagatggaatcacatagtcgatcataagctgatggcgaaatgaaatgagctgatagtaaagcaggaggtcttggtcttcttccatgatgtcaatgtcccgttcgatctcagttttaagcatttcagcgtcagtcacattaaacttttgaatatgccggttccactcattaatttccattccaacgtgcggagacgaaatcgtgcctaaactcctcacccttcctcttctcactatttatgtaaattttatcaatacagaaatttaataggaaggggttgagagaccgtaaaaaaagttttcggtgcagtccgaaaaaatcagtttgggtgtttcgcgttatatttggttttgtggaggggagtacaatctcaatatttgaattttggattgcggttattacgattgagcagtttcgtcgtactcttttagcagtttttctgtcttatgcatttctttgagcataggattcatgtagtcgttagctgattcaagatatgctcttgtgagagtgtctagtttatttttaactttagagaggtcttcttcgaattgttcctctgttaaatgttggataaattcttttgtctcttcgtatcttttcaatatgtttttcaccattggagttggattcttttgatttattgtttttattacagtgattgttaaattatttgttttattaattcttttcttactgtcaaggtgatgctccttttaaatctctattccatttcagagttgctatatctgtttaatggtttgatagactactcatctttataatttagagcaatttttacaacttgttccgctgtataatcttcattgctccagaaaattaaatcacttggtgccgggtgaggaacatttttctctaataaatcgagatattcactgactttctcatcatctaatgttgggttcattaattcttttacaagaaagatcgactcttcttttgtcagtttatccattgtttaccctcagatagattgtatctccattgattttttttacaaataactttatttcttctggtaatgttataggttgtttgcataatgataggtaattggcttgagaaaggttagcctcattatagagtttattaattgaatttataatgaatatattcatatggaaaacctctgaaatttctttattttagattggtttataaaaaaagctcagcagaggagggctgagctttttttaaattatagaccgaggtagctaattacaaattctttatcatcctcatcttcaggcaaaataccaaggtttttatattcccatattgcgattctttcataaccatctaattctgatgctaaaatatcatcagaattataatctaattggaattttccgctacgatccaatgttagtgtaaggttcgtccacacatcattgttattatttctgtgttcagttcttaattcttcaaaaagttctcttagctctcttaacaacgtcttgaagatatcctttcttacgttgtaatggctaggtagatcttgtgaataaataatttgattattttctggtgttctgaagtgaaaaagaaccattgtggaatcatctaatacttctgcataaagataaatttttgtccattcacaaggtatgatgtcatttaatttctgactaataagctgatacaaatcttgcatttttttagtttccaatcttttcaccttcaatcgtcgagaaatcttagttatcaaaaatagcccaacagagaagggctgagccaattttttgatttatagaccgaagtagtttattataaattctttatcgtcctcatctttaggcaatatccctaaattttgatatttccaaacatctcgtctttgaaggtcatcaagttcagaggataaaacatcattataattataatcaattgaaaactttccggtgttttctaattttaaagtgagattagtccaaatatcttggttgcctagtttaaattcttcttttagttcttcaaatagctcttgaagttcaatcagcagttgatcgtaaatctcttcgcttacattaaattgttcaggtatataatgagaatataagtaatcactattatttggtgttgtaaaataaaagtatatatctgctgagtcatcaagtatttcagcatataaaacgatcttttcccattgagatggaaccatttcatttagatgttcagcaatcttttgatatagttcacccattttttcattgttcatttagatattgttcaaggaactttctgctgttctcgcttattggtgtaattcccaagtgcttatattcccaaattacttgtcgctcagtatcagtatattttgaagcgagtacatcttcataatcataatcaattgagaattcaccgtttctatctaaatttagtgtgaggttagtccatatatctgaggattgctttttaaattcatcccttaattcatcaaataaatcttgaaggtctagcagcatatttttgtaaattcgattacttacttgaaaatgttctggaatatcgtgtgaataaatatattcttcgtcttcatgtgtgttaaagaaaaaataaacttctctggagtcatctaaaatttcggcgtatagagtaaccctcatccattcggagggaatcatatcatttattttttcagcaatcttttgatatagttgttccatttttgtagtttccattttcatcagcctccaatttggtttctaattgttatgctctttgttctttcttctccaattttatatgttatatcaaataaagtgggtcttaacgaatcgccctcatacacattttcaattgtgaccgtaaccttttttggaggttcttctttaagcgcttgcgaccatgcctgttctaacttataccatttcccaccgctcctattaatctgagaattcatcggcacgatattgtcgaactggcctgagcctttgaattgggtggcgattaaatggcctccgtcatcgtcgggctttcggtcttggggctttccagcattcgtctgtgcatattggtttcgttttgcttctcccagctgcaagtctgctttgacacttgtaattctaccatagttgtcagtcgtgtatgtgtagccttcttttgttttgtagatgatattgggcttcagtactttctttctgctccatcgtgcgaaatgctcgccgtatttgactgttaccggcggtacatgtggcgctggagttcgtcttccgcttgatgacgttccgtatggtttcggcaggatgaccttggcgaatttttgcagtccttctttaagcgtgaccccgttgactgcgttgtaaggaacgcctgccggcactaaatcatgacggggatgatacgggagaatatccgcaagtgtgagatctccgatttgatttaacttggttttgacgtgtttttttgatacttcaatgcctgtgtttactttttgtttgatgtgatcaacggtttgttttgagactgttatggctttttgggctgttgctgatttgcttgctgctgttttgactttggtcgtcactttggcggctgtgccagtttttgagacggctcctacgccttttgtgccgacaattgatgtgacaacagtgccaaccgcatatgacacccatcttgctcttgagtaggtgtcaccattcaccatgtctttttgatacgattcttcgattgccgctgaaatggcttcatacgttttgatcgggtgagccatcgctccggtaatcgcttcaacggttcctcccggatctgtgaccatatcccacaggcctacgaccgcgtctttcccggaatcataaaggccgacggcaacccctttgaagcctgcttcaagctcacgcgtgttttcaatttgggtgaagtatctctgttgttcagctgtcagattttcatagccgatcgtttttgccatttcgtagaattcatcggcatctgcataatcgtagtttttcagtctttctttcagtttctcaatctcgcgttccttcgcttcctctttcttaatcttcaagtaagcctcagtccgcttttcaatgtcgccttttttcttatgtatgtcactctcacggtacgccttggcgttgtagtggatgggtgtggcgtttttgcctttgcccgttgcttcttggagcttttggaagtcggatttgatgaattgttcgtttggttcagacagggcgtattctgttttcaggtcttcgtccaaggcgtccaatttttccagtatttttttgcgtttgtcgttggcatcggccagctcgtctttgaaggtttctgttgaaaacaggtcgagcgggaggatgtcgtcgatatcgttcaggatgtctttcatcgcttttttctgttcggacatgatggattttgattttttattggcatttgccagttcgtgctccaggaaggattcttcgatgtatgcgtcagagagggctttgtcctccgcggctccggcgatgctattgaaaaatgcgattttcatgtcgatgtagtcgatccattggtcggtgacgccgacgtggtcgtgatagaaggctttgatgttgctggcgccttttcctgaaaattcgctgtcactgagatcagcgacactttttaacgcttttctcaagttgaccatttgcgttcttagttctttgtactcttttgcacggtctgtcgcttccgaaagcagtgttttcgcttcaaatactttcatgaccatttcccttcttttgttcgctcaatatcaaaattttaccacggggcgggatgagggtgggggtgagaacgtgttttggtggaaaaatgagtcatttggcatgtgtctttattcgtggagggattggtggaaacatggtcgaaatgatattgattgctacacattttttggaagtttgtattctatattgttttttaaggagcatgttgatgacgaaaaaacggattacatttggtttattagttttaatggtatgtgtcatcctgtttgttctgtctgttcagttacgcaataaagacagtattcctgtccaatcttccgccatccaccccgaagaagaccgcatcttttttatctactccaatcctttcataaaagaaagcgtgctggtttcaacctctacaggcgaacggtttaacaggcgcacgtttaaggtggcggatgtgccttatattcaaacgaaatcttatgcatcaacagaacttgtattattggcggaacacgagcctttttactacacgctggagaaggatgcgatcaaagagcatccgctttcagatccatttgcgttttggcatgaggggaaggatgtctctgttaaggcctataatgttgatacgacgggaaatgagatccacataaacgacagaaaaacgaaaaaggaatatacccttaccttgccttcgcttgtcacgatgggggccagtgatgagaactatatttatatcattcaaagcatgtctatttacgtgattgatagaaaaacagaggaaatgattgagaccctgagcttagcctcatacgctgatcaattcgcagactcgaaggaatttattgttgcgagctcggagcatgaattgactgtgattgaaaaagggacatggaaaacgacatatattgcgtatcctgaagatcttgaatatgcagatactgtgtattatgacaaagaaagcggcagtttttacgttacgtacgaggacaaaaagggtgaggcgaacttgctggagtatgggaaggaattttcttttcatacatatagtttgaatttcccttatatggaagcaaagtttaaggggaatctattgtatatagttgcccaggaagagcataaaaagggcatcggcgggtatgtgggtgtgtttgatatccattctaagaagatgctttatcagtttgattttgcctgaggaacaggtgaaggtgcaggattttgttgtggttgacaataagtgaatacgtatatgaaatagaatgacaaagacccttgcataaagggttcttttttacgaaaaaaacaaattgacaggatgaaaaaacaatttcttcctttcgtattgttttcaaaatttgggattgatagaatatgacatatctcatagagaaggagggaagccgttgagtcaagccataccgtcttcgcgtgtaggtgttaagattaatgaatggtataaaatgattcgccagttcagtgttccggatgctgaggttctgaaagcggaggtggagcaggacattcagaggatggaagaggatcaggatttgctgatctattattctctgatgtgtttccggcaccagctgatgctggattatttggagccgggacaaccttacgggaatcgccctacagtgacagagcttcttgaaacgatagagacccctcagaaaaaactcacaggccttttgaaatactactctttgtttttccgcggcatgtatgaatttgatcaaaaagaatatgtggaagcgatcgggtattatcgcgaggcggagaaagaactgccgtttgtgtcagatgaaattgagaaagcggaattccattttaaagtggccgaagcgtattatcacatgaagcaaacccatgtgtcgatgcatcatattcttcaagccttagacatttatcaaaaaaatcccctatacagcattagaacgatacaaagcttgtttgtgatcgccggcaactatgatgatttcaaacattatgataaagcgctcccgcatttagaggcggcgctggaattggcaatggacattcaaaatgacaggtttatcgccatttctctattgaacatcgcgaacagctatgacagatcaggagatgatcagatggctgtagaacatttccaaaaagcggcgaaagtaagcagagagaaagtgcctgatctgcttccgaaagtcttgtttggattaagctggacattatgtaaagcgggccaaacacagaaggcgtttcagttcatagaggaaggattagaccatatcacagcacgttctcacaaattttataaagaattgtttctgttcttgcaggccgtgtacaaggagactgttgacgaacgaaaaattcatgatcttttaagctatttcgaaaaaaagaacctgcacgcgtacattgaagcatgtgcccggagtgctgccgctgtttttgaaagcagctgtcactttgaacaagctgctgcgttttatcggaaagtgctaaaagcccaagaagatattctaaaaggagagtgtttatatgcctattaagaaaaaagtgatgatgtgtctggctgttactctagttttgggaagcctgtcgtttccaaccctgacaaactccggcggatttaaggaatcaacagatcgaaatacgacgtatatcgatcattccccttacaaacttagtgatcagaagaaagcccttagctagggctttttcttgctttacggaagacgttccattttccacatcgcggcattccttctatttctaacgcaagacactcgaaacaaccaaaccatttgaggtataatggataaagtgaataacagtatttagattgatatatatgaaagagagtggaacatcatgggccgtaagtggaacaatattaaagagaagaaggcgtctaaggacgcaaatacgagtcggatttatgcgaagtttggccgtgagatttatgtggcggcgaaacagggcgagcctgatccggaatccaaccaggcgctgaaggttgtgcttgagcgtgcgaagacttacagcgtgccgaaaaacatcattgaacgtgcgatcgagaaggcgaagggcggagcggaagagaattacgatgagcttcgttatgagggcttcgggccgaacggatcaatgattatcgttgatgcgctgacgaataatgtaaaccgtacggcgccggaagtgcgtgcggcgttcgggaaaaacggcggaaacatgggtgtgagcggatctgttgcttacatgtttgacgcgacggctgtaatcggtgtggaaggcaaaactgctgacgaagcgcttgaaatcctgatggaagcggatgttgatgtacgtgacattttagaagaggatgacagcgtgatcgtatatgctgagcctgatcaattccatgcggtgcaagaggcgtttaaaaacgcgggtgtcgaggaatttacagtagcggagctgacaatgcttgcgcaaagtgaagtaacgcttccggatgatgcaaaggaacagtttgaaaaattgattgatgcattagaagatttggaagatgttcaacaggtatatcataacgttgatttaggtgagtaaggagtgagcaggctgttatggcctgctttttttgtcctggaaattgttttagctgtctgtaggcggccgcctatacgatctataagatattctcatactctggactgtaacctatgtgaaggagagagtgaatatgactgatacaagacatatgtatggcggacctggttttggtcattatcagggctttggtattggccacccgggttatggcatgtatggaggccacccgggctttggcatgtatggaggctacccagatcacggcatacatggaggtgtcggcggctatccgggatatggaacgtacggaggatacggaggatccggcggttacccaagcggcggctatggaggctctccgggaactgtaagttatccgaacatgcaccatgaaaatgatggccattaccactattatcaccatcatcatgatggaaaagataatcttcatcaccatcatcaccatgttggaaaggataatcatcaccaccatcatgatggtcattatggccaccatcaccaccatatgggccactggggaaaagacggttataaataaagaagatgatggtataaagaggacactcttgcagatcaagagtgttttttatctttttttcttgactgttcagtctggaaactggtaacatttgtttcgggaggtgatcgttttttggggaggaataaagaatttgatacggcgcttgttcttcacagggcgatagaggttttcggagagtatggctacgaaggaacgtctcttcagcatctgctctctcatttaggcattgcgcgccagagcttgtatgatacgtatggcacgaagcgtgatttgtttttgtccgcggtgaaatcgtatcttgaagggaaaaacgctgccgttatggaaaggcttgaagcgccaggatctgtaaaggaagccattcgtgatatttttcaagaaggtgtcaatgccctgagggacccggaacgggcgaaggcgtgttacattatgaacagcgcgattgaacagattcctcatgaccctgagcttgccctgtattttgaaagacaatccaagcagcttgagaacgctttttatcaggcgcttttaagagcgaaggatcaaggagaattgaatggagaagagactgatatatctgcgcttgcccggtacctgaatcaaagcaggctgtcattgacatttgttgcgaaagtgacggcagatatggatcggcttcaagaccatgttgacgtgagtttatcagtgcttgattaacatgtggtaaagaattctttgcccatgtatgtactttttggactgaatagtctagaaataaaaatgaggtgatgatgaatgttgatgaatgagtttgaaaaagcatgtgaaacattgagaaagtttatggcttatatgcttgagaaggacatgaagagctggacggagctttgggatgagaatgctgtatttgagtttccttatgcgccggagggatcaccaaaaagaatagaaggaaaagcggccatttacgattatattaaagattatcctaagcagattcatctttcttcatttaccgctccgacagtgtaccgttcagcagactcgaatacggtgattgcggagtttcaatgtgacggccatgtgattgagactggactgccttatcgccaaagctatatcagtgtcatcgaaacgagagacggccgcattgtgcgttatagggattattggaatccgcttgttgtaaaagaggcctttggaggatcatttttgcaaacagaggagagtgggaaatgatgaaacagaatccgattttaatcacgggcgggaccggcacagtcggcagccgaatcgccagccgtttaataaagctgggatacagagtgcgtattgcaagccgaaaaaagggcgcgcttgcaagtgcggagtatgtgtattttgattggaaggatgcctccagttttacgcctgctctagaacaggtaaaagacatctatcttgttgctccggttggtgtacttgatccggctccctatgtgcttccctttttaaaggaagcaaagcgtctcggcgcaaagcgggtagtgatgcaaagtgcgtctgttgtctccgagaacggtcccgtgtttggcgcgcttcaccaggcagtgcgcgagtttccagaatggacggtgctgcggccctcatactttatgcaaaatttcatcaatgtccagcatcgcatgtctattcaaacggaggggcgcatcatcacagcttcgggtgagggaaagctaggattcattgatgctgatgacatcgcagaaacagccatacgcgctttaattgaagctgttcctcatcaaacacatcatatcctgacaggacccgaagcgctgagctatgccgaagcggcagagattatcggtgctgcggcgggacgccgggtggagcatgtcagcatttctcgttccgagctgcagaatcggatggaggcagctggtttgccggctgattatgcggattttatggcggggcttgatgaggcaatcagccatggtgcggaacatcgggtaacggatacagtgaagcgtgtgacgggaaaagaacctcgttcgctgtcagagtttgcggctgctcatgctgcatattggaaacactgacctcattttagactgaatagtctagaaagaccttcggcgcttccgaaggtcttcttattgaaaaagctaagtcgtgtttcagtcataatcatgcctcctgcttcatacctattaaggtcattgtttttgagaaaggaggagccggaatgaaggatatgcagccgttttcgcctgtcaaatcatatacgccctttcacagccgttttgatccctgtccgcccatagggaagaaatattacagaacgccccctaacctttatatgacctttcagcctgagcacatggagcagttttcgccgatggaggctttgaggaaaggcaccctttggaaggatctctatgatttttatgaaaacccttatcgagggggagacgcacatggcaaaaaaggttgatgccgaatattatcgtcagctagagcaaatacaggctgctgattttgtgcttgttgagctgagtctttatttaaatacacatcctcatgatgaggatgcgctgaatcaattcaatcaatattccggctattcaaggcacttaaaaagacagttcgaatcctcttacggaccgcttctgcagttcggcaacagccccgcgggcaaggattgggattggggaaaagggccatggccgtggcaagtataaggaggaatgcctgaatgtgggtgtatgaaaagaagctgcaataccctgtcaaggtcagtacgtgcaacccgacgctggcgaagtatttgattgagcagtatggcggagcggacggcgagctggccgcggctctccggtatttgaaccagcgttatacgattcctgataaggtcatcggccttttaacagatatcggcacggaggagtttgcccatttggaaatgattgcgaccatggtctataagttaacaaaagacgccacaccggagcagctgcgtgaagctgggcttggcgatcattacgtcaatcacgacagcgcgcttttttatcataatgcggcgggcgtgccgtttaccgcgagctatatccaagcgaagggcgatccaattgccgatttatacgaagatattgccgcagaagaaaaggcgcgggcgacgtatcaatggctgattgatatttcggatgatcctgatttaaacgattccctgcgttttttgcgtgagcgtgaaatcgtacactctatgcgcttcagagaagcggttgaaattttaaaagaagaacgggataaaaagaagattttctaataggcagattggcctctctttcatacacccttttacatacagagaaaatggtctgtttttgcagtttggtctgcattataatcaaggtgtgtgtgcaagcttactttttgattgggaggcctttatgtcagcttttaagattgagaacgaaacgattgcagatggattttacgcgtgtccggccgtctatgaggatgcagaatcgattaccgggttgctcgtccgaacagctgaatggctccgggatcggggttctaaccaatggagcggacttctgaaagggcaagatatacatgatatcacggggtcaattgaaaagggacatgtgtttgtgtttaaaaaagatgaagagcttgcggctgtcgtgatgctgctgcctgaaccgagcgagtgggaccggacgctttggggagacgatgggcatgaggagtccatttatttgcaccgcctcgcagtaagccgccggtttgcgggacaggggctaggagcccgcgtccttcagtgggcggagacgggcatacactttccggaaaaaacgcggatccggcttgactgtgtcgctgatagcgacgccctgcattccttttatcggcgtatgggatatgaattcatgggtgctgatgcgtccggatatcatttgtttgagaaagagattacggcagaataagcgtcctttgcagggggcttttttgtcttttctaaaagggagggcaggcgatgtgtggccaatattatttgtgacagggattgtgacggcttgtctgtttgctggcgtatccgttttgatgcggatgagatttcctgacaaaagtcggccggaatggatgttgaccgggctgatcgtccttggtgtgtttgcgatctggtacagcctcgtgtatgtacgcggctgggaaggggctgcgctcggaatgcttggattcaatgtcattttcggagccattgccggatatttgatcgataaggccatccggcgttacaggaaaagataaggctgctgccgtctctcatcatgtcgaaattttcacagaccggcaggaattttctttcgaaaggagaaatacatattactttaaaatgaaagcgttttccaaagcgggaaggtgatgttgatgatacacagtgtgacaaatgggctgaatcgtttttgtacgtgggtgatgagattggcctatttgaatgtgctttggattttgttttctcttgcaggcctggttgtgtttgggctgatgcccgctactgccgcgatgtttacagtggcgagagaatgggcgaaggggaatacagatgccccggtgttttctgtcttttttcggacgtttaaaaaggaatggcgggcatcacagatcctcgggcttatcgttgtgacggctgccctgtttctgtttgcggatatgcggatagcggctcagatggaccagcctgtgctcgtcaatgtattcctgagcattagtttgattttcgcgtttgttgtgctgtatgtgttcccggtattttctcattttgacgtaaaaatcagagaggtgctgagcatcagctttttcattgccttcagccgtccggcggtgacgcttttgatggcggcgggcgctgtcggtgtgctttgtctcgttctgtttcatgtcacgtttctattgtttttcagcgggagtttactcagcctgatcttaacgaagctgtcctttaaagcgtttcggtcaatggatcagcggcaggagaaagaaaaggcggcatgaagaaaagagttgctggctggtacaggcggatgaagattaaggataagctgtttgtgtttctatcgttgattatggccgtatcctttctgtttgtatacagcggggtccagtatgcctttcatgtgtatgatgagcagatttaccgcaagtcctcggaggtgcttcggatgtcttctgaaaggatcgaagacgagctgaagaagatagaggatgtgtcatatgaaatcattacagacgaacagattcagcgcatcctgagtatgcaaaatcgggatgatacgtatgatcaatatcaaatgaagcaggagctgtgggatcagcttgcgggatatgccagcgatgaaaagtacatcgattccattcatgtgattgatgcccgcggctcagaatattcagccggaagcagttcttcagatcttttgcagcaggagcaggaagaggtatttaagcgagcgaaagcgaaaagtggaagaaatctttggatgacgctcggcgggtcagatcctgtcctgatttcagcacggcagatcaggtcctatcaccagctgagtttgaacggcttgggcatggtgctgatccaggtcaatgtaaaacagatgattcgtgatgtgccgaaggattggggcgattcagtcggagacattatgattgctgaccaaggcggtaatttggtgtatacggcacatgcatcagcgcatgttcctgaggcagcaaaagagacgctgaagcaccccggttatgacttgataaaaaagaatggcaaacgttactttatttcttaccttcaatcatcctaccaaaattggagctactataacgttatcccctttgatcagatgttcgcaaaaatttcctttatgaaaacagtgatcggcacatgctttcttctctttttctgtgtggttttgcttttcggaaggaaaatcgccaacagcatcacggagccgattgaacagcttgtgaccgcgatgaaatcggtacagcacagcggcattgaagcaggtgtgtcgctttctctgccggaacatacacaggatgaggccggcatgctgaaccgccattttactgtcatgatgaaacggattaatgagctgatggaagaaaatgtggaaaaacagctcatcattaaagaaaccgaattgaaagcactgcaagcccagatcaatccgcattttttatataacacgctcgagtccatcaattggctggccaaggcgaatcagcaaaagcaaatctcaaaaatggtggaatcgctcggttttcttctgcgaaacagcatacatatgaagaaggatatcgtgaccattcaggaggaggcggacattgtacgtcactatatgaccattcagcgatttcgatttgaagagcgcctgaatttcacgttggatattgacgatgaggtgaagcattgcctcattccgaaactgacgctccagccgcttgcggaaaatgcgattcaatacgcgcttgaaccctttacaaggccatgcgccatccggattcaggcgaaaaaggcgaagggctgtgtctgtattacggtcgaagataacggccctggcatggatggacggattcttgaatcaacgggtggaagaggaatcggactttggaatattcgcgagcgcatcagcctgacattcggagagccatacggcttgcggattcatagtgagcatgaaaaggcgacgaggattgtgatcacaataccgtgccgaaatgaggtggtgtgatgtataaaatactgctggctgatgatgagaggattatccttgatggaatggcgggaatcattgagtgggagtcgcttggcgcctcattgatcggaaaagcgcagaacggacatgaagcatatgaaaagattgtacataagcagccgcatatcgtcatcacagacgtcaaaatgcccggcatggacgggcttgagctgatcaaaaaggtgtcagccgacagcccgtcggtgcaatttatcgtcctgtccgggtttggagagtttgaatacgcaaaggaagccatgaaatatggggtgaagcattatttgctgaaaccctgcaatgaacagcagattatcagctcgctggaggaaatcattgctgagctgaagcggcaagatgtgcacaaaaagaaaacagcccatctgaaacacgagctggaccatatccgttcctttgcagccgatcaatacttggaaggcttgatcgccggtgtggcccagctgtctccgccgccatcacttgccggaaaaaagatccgcctcttgatcttaaaaggggaacaatctattgatgccgcagccagagaggcactcggatcggcactgacagcggtttgcagcagcggagaatggaccgtactcgccgtagaggagaacgccgctgaaaaggtggcggaggtttttgcaacccgcaagatggccatcagtcaggcgggagaactccggcacgcggggcagctgtttcgtgacacagctgaagcgtctggtgacctgcatgggagcgcagtgatttcaaaaatgatcaggcttattgccgacgagctcggaaatccgaatctgtccttaaaatgggcggcgaaggatatgctgtttatgaatcctgattatctcgggaagttatttaagcaggaaacaggcgagaaattttcacaatatgttacacgagtgcgtcttgaacatgcgataaaacagatgaaaatgaggcgggatgcgagtgtatcagaaattgctgaagaaatcgggtttggcgataatccgaagtatttcagtcttgtttttaaaaaatataccggtctgacaccgtcagaattcagaagaaaacagggaggcgcttccgcaggatagccatctctgtttttttgactttcgccactgttttttgagtgtttcgccttatccgaacgctttaaaataaaatgtaagcacttacattaaaggggggattggtttgaagaagatttgttacgttctgttatcgcttgtctgtgtctttattttcagcggatgttctgtgggcgaagaggcatcggggaaaaaagaagacattacgctcagaatcgcgtggtggggcgggcagccaaggcatgattatacaacaaaggtaattgaactttacgagaaaaagaatcctcacgtccatattgaagcggaatttgcgaactgggatgactactggaaaaagcttgcgcccatgtctgccgccggccagcttcctgatgtcattcaaatggataccgcttacttagcccaatacggaaagaagaaccagctggaagatttaacgccgtatacaaaggatgggacgattgacgtcagttcaatcgacgagaatatgctgtcgggcggaaaaatcgacaataagctttatggatttacgctaggtgtcaacgtgctgtctgtgattgccaatgaagatttgctgaaaaaagccggtgtgtctatcaatcaggaaaactggacgtgggaggattacgagaagctggcgtatgatcttcaggaaaaagccggtgtctacggttccaacggaatgcatccgcctgatattttcttcccttattatttgcgcacaaagggtgagcgcttttataaagaagacggcactggcctcgcgtatcaagatgatcagctgtttgtcgattactttgaacggcagctgaggctggtgaaagcgaaaacgtccccaacacctgatgaaagcgcacagattaaagggatggaagacgattttatcgtcaaaggcaaatcagcgattacatggaactactccaatcaatatttgggctttgcccggctgacagactcgccgctgtctctctatctgccgccggagcaaatgaaggaaaaggcgctgacattgaagccgagtatgctgttttccattccgaaaagctctgagcataaaaaagaggcagcgaaatttattaatttcttcgtgaataatgaggaagcgaaccagctgattaaaggcgagcgaggtgttccagtctccgacaaggtggcggatgcgattaaaccgaggctgaatgaggaagaagccaacatcgtggagtatgtagaaaccgcgtccaaaaacatcagcaaagccgatccgccagagcctgtgggaagcgcggaggtcatcaagctgctgaaggatacgtcagatcagattctgtatcagaaggtatcgccggaaaaagccgccaaaacgttccggaaaaaggccaatgagatattagagaggaataattgacgggaaatggggctgacgcaatgaaaaaaagccggagtataagaaaagacaatctggcgggatatgcttttatttctccgtttatcatcgggttcctatgctttacggtgatcccgatgggggcgtccctgtttctgtccttcacgagctatgacttgtttacggcgccgaaatggatcgggctcgacaactttaaggaaatgtttacgggtgacgaaaagtattggcagtctctgaaggtgacgtttacgtatgtgcttgccggggttccgctccgtctcggcttcgcgctttttatcgctgtcattttaaacaatgcagcaaaaggaacggccatttacagaacgctcttttatctgccttcgatcatcggcgggagcgtcgccgtggcgattatgtggcgcaatatttttggcaatgacggggtcatcaatgcgctgctgttttttgtcgggattgatcaaaaaattctttggtaccagaatccgacaagtgcgctgtggacattgattctgctgtccgtctggcagttcgggtcgtcaatgctcatttttctggccgggctgaaaaacattccgtcttcgtatttggaagcggcaagtgtggatggggcaaatcgggtgcagcgtttcttcaagatcacgcttccgatccttacaccgattattttctttaatcttgtgatgcagacgatttctgcttttatgacatttacacctgcctatatcatttcgaagggcgagggcgggccgcttgacgggacacttctctattcgctctatttgttccagcgtgcgtttaactattttcaaatgggctacgcatcggcgatggcatgggtcatgcttgtcattgtcgggctgattacgctcatattgtttaaaacatcgtcatattgggttcattacgagtcaaaggaggaatgacggatggagccggtcaacgagcctgtcagaaaagccccggtttttgaaagaaaaaaagccgggcgcgtcagtcccaaacgcatactgttccatgtttttacggcaacgctggcggtgttgctgctgtacccggttatttggctgtttgtcagctcgtttaaagaaagcgccagtatttttacaacctcacattctctcattccagacccttttattctcagtaactatgctgaagggtggaagggcattgcgggacagccgtttctgacgtttattaaaaactcggcgattattgtcgggctgtcaacaatcggtgccgtcatgtcatcggctgtcattgcgtacggatttgcgcgtataccgtttaagggaaaaaaattttggtttacgtgcatgatggggacgttaatgctgcctcatgaagtgttgatgattccgcagtatattatgtttgcgaaattagactggctgaattcctttaaaccaattgtcgttccgcaatttttcgggcatgcgttttttatctttctgatgatccagtttatccggacgattcccgaggagctggatgaagccgcgcgaatcgacggatgcggacgctttgcctgcttttggcggatcattctcccgctgattgcccccgcgcttgcgacgtctgcgattttctccttctattggaagtgggaggagctgattcagccgctcttgtatttgaataagccggagctttaccctgtttcacttgcgctgaagctttttctcgatacagagtcggcttcgaactggggcgcgatgtttgccatgtcggccgtctcgttattgcctgtgattcttgttttctttttgtttcagaaatatatcgttcagggcatcagtacgaccggattaaaataaaaaggagtgttgcagatggcacagcttatctttgatgaagaaaaggtgacgtccgtcattgaccggatcgtgaaacggacatttcagatggattttgcgtgggattggccgggcggcgtcgcgttttacggtgtggcggaggcctatgaagcgacggaaaacgaggaatatatcaatctgttaaaaacgtgggtggatgaacagctggaggatgggctgccgccgctttcgatcaacggagtttccattgggcatacgcttttgttcctccacaaggtgacaggtgatgacgtgtatttggaaacagcggccgagatggcggaatatgtgctgcataaggcgccgcgctttggcgagggtatccttcagcatacggtgaatgcagcagaatacgtgtttcctgagcaggcatgggcggatacgctgatgatggctgggctgtttatgctgagaatcgggcggatcatggagcgtgaggattattttgaagacggcctgcgccagtttcacggacatgaggacgtgcttcaggaccctgtcacgaatttgtactaccacgcctgggacaacaaagcgcaaaatcatctgtcggggatttattggggcagggcgaacggctgggcggcactcacgatggcaaaggcgctcccccttattgaggtgacacatccttcctttatgatcatcgacggatcgctcagagaccaactgagcgcgcttgtccggcttcaggatgaatcagggctgtggcatacgattttggatgatccggattcttatctggaggtttcggcatcagcgggtattgcttctgctctgatgtcgagcggaaagctgtatacaaaatatgtgcagaaatcgcttgccgccattttggatgcggtggaagaggacggacgggtcagcaaggtatcggccgggacagccgtcatgaaaaatgccgaaggatacaaacaggtgccttacaaacgaatacaaggatgggggcagggacttgcgctgacgtttcttgctgatgttttgaaaacgaaaaaacgcgtgtatcagtaaagacagcggcggggggaaagggatgaaaaaacagcctcaacagaaggaacgggtttctcgctggaagggaacgtattttaaaagaaactttgtcttcattttgctgattgcctgtattcccggattgctgactggcggcgcaatctactttctttcgatcgacaaggtggagaaagagctgcagagatcgcatgaaacacaggtggcgcgtgaggtcagccgaatggatgagaagctgggagtgcttgaactggcactcacccagatggcctacgattcttcactgatgaacggattggccgagagggatttggagaaagactttacgttctcctatcaattaacgaaaaagctgtttcttttgcgggaccagcagccgctgatcaagcaggcttccatctttctgaacagcccccggccacttgtgctgagccctgaatacagcgctttgacagaacaggaggcgcttcgcaagtatcgctcgctgcttgcctcagaccacagcatttattggaaacggtcgagaaaccaagcgatgctgatccagctcattccgggcgcggcggagaaaccgttcggcgcgatcatgctggcggttgatccgaaagaaatggaatcaatcctgcaaagcttgtccccctatcctgatggcagtgcgctgcttttagatcaaaatcgagaggtgctgtttcatgagggggaaaaagattttgaaaagactttacttcatgagataaaaaaacagcctgctgagaaaggccattttcagatggaatgggaaggcaaggtgtattctgtctcctttggagaaatgaaccggatgcatcagcaatggacctttgtgtcagcggcgcctctttcagctattacagcgccgatggtgtttttatcaaaagtgatcatcgtgatgctggtcatttgcatcggtttggcggtgtgcatgacatggtatgcatcaaaaaaaatctatcgtcccatccagcatttgcttggcttgtttaccggaggagagaagaaaacatggcaggcgtccgggcaggatgaattcaaatggattgaaaagagatggcaggatctatcccttgaaagccggaagctccaacagcagctcctgcggcagacgccccatatgaaaaaaagttttttgcagcatctcttgcagggcgatttttactatgacaacgaggaaagcctcagattgcggatggaggaggctggctggaacatcggcggaaacgcgtttcatgtgcttgatctgcaggtgacagggctccgttgtgaaaaaagcatcttctgttgcgatgatgaacagcttgccgtgtttacactgactaatatcgctgaggaattggcggctaaacgcgtttttcagctctccatacttgatatcggccggctttctgtcaccgttcttgtgatgaaaacaaacagctctgatctgaaggcgtatataacggagctggcacgccaatttggagatgtaaccggactatgcctgacctcgacattgagcagcaagacggagcgtgtcacggaaattccttctttatttcaggatgtgaaatgcggcaaatcccgcaggaagtttgctaaccgggatcaggtcattgatttgcaggccgacttccctcaggatgagcagttcgctccttattacccttttgagctggaaaaacaaattgttcaggccatccggctggaaagaaaacaggaagccaaggaactgatagatggatgtatgagggaactggcggaaaaggcggccatagacaggcatgtgcattccgccctgattcagctgttttcccgcattcaggaggatattttgcattccaggctcaatcccagcgaactgtttcagcatcggaacccgtttcttgatatttcagaattgcgcgaacctaatgaagcggcggcctggctgatggatgcagtggtgacgccttacctttccaagcttgagggcagaaaaaacagacagcaaaagcagctggcagaacgtgtgattgcgatgattcacgaacagtatatggcggacatttcattggaaagctgtgccgatgcgcttggcatgaattcatatacgttaagcaaggcatttaagcaagtgaccggcattaattttatcgattatgtgacccagatcagaatcgaaaaggcgaaagaactgctggtcaatacgaataaaaaaattcatgacgtgtcagaagaagtcggctaccgccacaattactttaaccggatttttaaaaaacaggtcggcatgccgccgggtgtcttcaggcaaatgtatcaggaaacgccgtgaaaggagagaacatgtgatgaaaaaaccgattcaagtatttttagcgggagattccactgtgagtgactgcctgcctcatgaagcgccgatggcggggtgggggcaggtattcgggcaattgttttctgaagatgtgctggtccgcaatcatgccaaaggaggagcgagcaccaattcttttgtggaggaaggaaggcttcaagcaattgccgagcacatcacacaaggcgattatctgttgattcaattcggccacaatgaccaaaaaccgcgggggacgaagccgtactccacatttcagcagtttcttaccttgtttgcagatacggcacgcgaaaagggcgcgcatcctgtgttcgtcacatcggtgcagcgccgccgctttgatgaaaacggacggatcgagcatacgctcggtgagtatcccgatgcgatgaaagcactggcgaaggagctcgatgtacctgtgattgatctgcttgcgaaaacaaaggtgctgtatgaagcatacgggccggaggagtcgaagcgattgttcgtttggtttcagccaaatgaacatccgaattacccggacggcattgaggacaatacgcatttttcagaaaaaggtgcaatggaggttgcgaagcttgtggcagaaggcattgaagagctcggacttccgcttaaggaccaccttgtgagccgggagggaaaaggacatgtataaggaaggcgcttgcctgtaccgcaatccgctccggtctaaaagcgatgtgaaggactggcggatggagggaggcggacagatctcatttgacgatcacagcttgcacctgtcacatgtccaggacgaagcgcactttgtcttttggtgtccggaaacctttccagacggcatcattgtgacatgggacttctctccgatcgagcagccgggattgtgtatgctgtttttttctgctgcgggaatgggaggcgaggatttgtttgatccaagtctccagaaaagaacgggacaataccccgagtatcattcgggggacgtcaacgctctccacctgtcgtatttccgcagaaaatacgcggaggaaagagcattccgcacctgcaatttaagaaaaagccgcggtttccacctcgccgcaatgggtgccgatccgctgccttctccagacgacgctgattctccgtatcgtatgaagctgatcaaagacaaaggctatgtgcacttttcaatcaatggtctgcccattcttgagtggatggacgacggcagcacatatgggcctgtgttaacaaaaggaaaaatcgggttccggcagatggcccccatgaaagcagcttacagggattttgccgtacatgaagcggtgagaagatgaagacgactgtaacggacgcgctttatgcaggctgcgaagcggtggtgaaaatagcatggctcaacgggctgtggctgttgtttacacttttgggcggcgttcttttcggatgggcgccgagcacagccgcgatgtgtgccgttataaggaaatggctgatggggcaaaaggatgtcctgatatttccgttatttctcgatacctataaaaaagagtttctcaaggttaatgcgatcggattggcgttttcggctcttttgttcatattgtccgcgaactatcattatttttctgccagtacgaattggctgtcctttgccgtaacaagctgcacgctgcttgcagggcttttgtatatcatcgcgctgatgtatgtgtttcccctttatgtgcattaccagctcccgcttcgcaaatatataccgcaggcactgctgtttggcgccatgagaccgctgacgaccggctgtatgctgatcgggtgcggatttgtcctttatttgctgtatatgcttcctggcctgatcccattttacggcccgtgtttatttgggcttgtgttgatgttttttgctcttaggggatttcaaaagacggaggcccagcaccatcaagccgggtaacaaaaaaatgacaaatacgcaaaaaagtgcagtgtccgaaataggcagatgcaaaaaagtgaaattgaagacagctcacacagcgcataaaatccaatttaagtaagcgcttacagatgaatgagaaggagctgtctgatgattacacaaaggaaacgcatgtttaccgctgttatgttgctggtcttgttggtgatgggagcctctgtatgtcctgtgaaagctgaaggggcagcgcggcagatggaagcgctgaaccgggggcttgtagcggtcaagacggacgggggcatttttgtcagctggcggtttcttggaaccgaaaacgcatctgttttgttcaatgtgtacagagacgggcaaaaactgaatgctgcgcctgtcaaaaccacgaactatgtggataaaaacggatcggcgggctcaacgtatacggttcgggctgttgtaaacggtaccgaacagccggcttctgaaaaagcctccgtatgggcgcagccgtatcattccgtcccgctggataaaccggctggcggcacgacgccaaagggtgaagcttacccgtacagcgctaatgacgcaagtgttggcgatgtggatggtgacgggcaatacgagctgatcctgaaatgggacccgtccaactcaaaagacaattcacaggatggctatacgggtgacgtgctgattgacgcgtataaactggacggcacaaagttatggcggatcaatctcggcaaaaacatcagagcgggcgcgcactacacccagtttatggtgtatgaccttgatggtgacggaaaagcggaagtggcaatgagaacggcagacgggacaaaagacggcacgggcaaagtaattggagatgccaatgcagattacagaaatgaacaggggcgtgttctttcaggccctgaatatctcactgtgtttcaaggttcaaccgggaaagagcttgtcaccgcaaattttgaaccggcgcgcggcaatgtgtcggattggggagacagctacggcaaccgtgttgaccgttttctcgccggcattgcctaccttgatggacagcggccgagcctgatcatgaccagagggtattacgctaaaaccatgctagttgcctataacttcagggatggaaagctgtcaaagctttggacgctggactcctcaaagtcaggaaatgaagcgtttgccggacaggggaatcacaacctgagcatcgcggacgttgacggggatggaaaagatgagattattttcggctcaatggctgttgatcatgacgggaaaggcatgtactcgaccggcttaggccatggggatgcccttcatacaggagatcttgatccgggccggccggggcttgaggtgtttcaagttcatgaggacaaaaatgcaaaatacggcttatcttttcgggatgctgcaaccggaaaaatcctttggggcgtttatgccggcaaggatgtaggccggggaatggctgctgatattgacccgcgttatccgggacaggaagtgtgggcaaacggttctctctactcagcgaaaggggtcaaaatcggaagcggggttccgtcctcgaccaacttcggcatctggtgggacggcgatctgctccgggaacagctggacagcaaccgaattgataagtgggattatcaaaacggcgtatcgaaaaatgtgctgactgcatcaggcgcagcggctaacaacggcacaaaagcaacaccggcgcttcaagctgatctgctcggtgactggcgcgaggaagtcgtgtggagaacggaggacagcagtgctctgcgcatttacacgacgaccattccgactgagcacaggctgtatacgttgatgcacgatccggtgtaccggcttggcatcgcctggcaaaatgtcgcctataaccagccgccgcacacaagcttctttttaggagacggcatggcggaacagccaaaaccaaatatgtatacgccttaactgaaagggggaaggaacgggctgcgcgcagcccgttcccatcaaatgaaaccaaaaaagaggcaaatggaatacttgaccagaggtttgattgcggtaaagacagaacagggcgtgtttatcagctggcgttttctcggcacggatcataagacgacggcttttcacctttatcgggatggaaagcggatcacccgcgatccaatcgctgaaagcactaattttctcgatcaaaacggaacggctgacgctgtttatcaggtggcggccgtcaataagggaagggaagaaaaactgtccaaagaagctccagtctggcgggaaaatgtactggaggttccgcttgccaaaccagaaggcggtgtgacgccggatggaaagccgtacacctacagcgccaatgatgccagcgtcggggatgtggacggggatggagaatatgaaatcatcctgaagtgggacccgtccaattcaaaagacaacgctcatgacgggtatacaggggaggtgctcatagatgcctataaactggacggcacctttttgtggcgcatcaaccttggcagaaacatcagggcaggcgctcattacacgcaatttatggtgtatgacctggatggtgacggaaaagcagaaatagccatgaaaacagctgacggcacaacagacgggaaaggacatatcatcggtgatgagcatgccgattttagaaacgaacagggcagaattttgtccggtccggaatatttgaccgtgtttaaaggagaaaccggtgaggaactcacgaccgtggaatatgaaccaccccgcggcaagctggaggattggggagacggctatggaaacaggatggaccgttttctcgccgggatcgcttatttggatggggagcggccgagccttgttatggcgcgcggctactatacgagagccgtgctcgtggcatacgatttcagaaacggaaggctcaaaaaacgctgggtatttgactccaaccatccgggacatgaagcgtacgcaggacaggggaaccacagtttaagcgtggcggacgtcgacggagacggaaaagatgaaatcatatacggcgcaatggctgtcgatcatgacggaaccggcctgtactcaacggggctcgggcacggagacgcgatgcatgtaggggatctggacccgtcacgaaaagggcttgaagtgttccaggtgcatgaggacgccacgaagccgtacggactgtcgctgcgagatgccggaaccggtgagatattatggggcgtccatgctggaactgacgttggccggggcatggcggctcatattgatccaagctacaaaggatcgctcgtctggggaattgatccgccgggcaatgatggcatgtcgtatgggcttttcacgagcaaaggcgaaaaaatcagcgacaaagcgcccgcttcagccaatttcgccatctggtgggacggtgatttggtcagagaactgcttgatcatgactgggacggaaagatcggcaggccaaagattgaaaaatgggatgctgaaaacggctgtctgaagacggtatttcagccggccggcgtgctatccaacaacggcacgaaaggaaacccggttcttcaggccaacctgttcggagactggcgggaagaagtgatatggagaacggaagacagcagcgcgctccgtatctatacaacgacacatctcacccgccaccgcttttacacgctgatgcatgatccggtttacaggctcggcatcgcctggcagaataccgcctacaaccagccgccgcacacgagcttttacctcggaacgggaatgaaaaaaccgccgaagcccgccctgtacatagcgggaagtaaagcggaggcgccgctgtaggaggactaaggataagaagcagccgtataaaaaacgagggggaataaaaaatggcaaatcatatttatcttgccggcgattcgactgttcaaacgtatggagacagcacaaatcaagggggctgggggcagtttctcggctcgcatctgccggagcatattcaagtgatcaacagagcgatcgggggaagaagctcgaaaacatttgtggaagagggcaggcttcaggcaatcctcgatgtgattgagccggatgattggctgttcgtgcagatgggccataatgacgcgtcaaaaaataagccggagcgctacaccgagccctatactacttataaacaatatttaaagcagtatatcgcaggcgcgcgggaaaaaggcgcccatccgcttctcattacccccgtagcccgctttcattacgaaaacggcgtgtttttgaacgattttcctgattactgcattgccatgaagcagacggctgaagaggagaatgtccagctcattgatctgatggagaaaagtctcgctttctttactgagaagggcgaggaaaaagtgtacacctattttatgatttcagaagggattaatgattacacgcattttacaaaaaaaggcgcaaatgaaatggcgaaacttgtggcaaaaggcataaaggagctcggcctgccattgacagaatcgatcatcaaagaaaggtgaaaatgggatgagaaaactgtatcatggcgcttgctattatccggaattatgggatgaagagacgattcagcaggacattgacatcatgcgtgaagttggcgtaaatgttgtgcggatcggcgaatttgcctggtctgtcatggaacctgaagaaggaaaaattgacgtcggttttttcaaagaaatcatcgcccggctgtatgaaagcgggatcgaaacgattatgtgcacgccgacgcctaccccgccaatttggttctcacacggcctgcccgaacgcatgcatgtcaatgaaaaaagagagatcatggggcatggctcccgtcagcatgcctgtacgaacaacccgtatttccgaaaaaaaaaccgccatcatcaccacagccatcgccaaggagcttggccggctccctgggctgatcggatggcagctagacaatgagtttaaatgccatgttgcagaatgtatgtgtgagacatgtttgcgcttatggcatgactggctcaaaaatcgctacggggtgattgagcgcttgaatgaagcttggggaaccgatgtgtggagcgaaacctatcagacgtttgagcaagtcccgcagccgggaccggccccgtttctgcatcacgcttccctaagcaccatgtatcagctgttttcgatggagatgatcgcttcgtttgcggatgaacaggccaaaatcatccgctgctattcagatgcgccgatcacgcataatggatcagtcatgttcagcgtggacaatgagcgaatgtttcagaatctcgattttgcctcctatgacacgtacgcttcgcaggaaaacgcctctgcctttttattgaactgtgatttatggagaaatttgaaacaggggcgcccgttttggattttggaaacgagtccgtcgtatgccgcctcgcttgaaagctccgcttacccgcacgcagacgggtatttgcaggccgaagccgtatcgtcctacgccttaggaagccaggggttttgctgctggctatggcgacagcagcgttcaggcagcgagatttcccacggttcggttctcagtgcctggggcgaacccaccatcggctaccaaaatgtgctggcggttgagcgggcaagaaaggaatcgagcctattattctatcgactgaacccgttcaagccgaggcggcgatgacttactatgacagagcaaaagcatttattaaaactgagcctcaccggggactccggcatcgttcgcttgtgacgcatttttatgaacgtattctcaacacggggattcaccgtgatcttattccggaaggcgctccactggacggctatcgcttgctgtttacgccatttatgccgtatttgtcttctgaatttatcaaaaaagcttcggcattcgctgaagctggcggcatctggatcaccgggccgctgacaggagggcgcacatgcgagcataccattcataccgattgcggacttggcgaacttgagaaaacgtcagggatcaaaacactttttacctttccgatgaatgagaacgtgaatacaggaaaagcgtttggcatcacggcgccgctcggactatggagcacggtgtttgacacagagagcggaaacacccttggtacggttgaagcaggaccgggggcgggccatgcttttctgacggaacagaattacggcgaggggaaaattgtcatgctgggctcgcctccatccgggaaagaaggggatgcgatgctggaagcgctcgtcaggcattacgcggaggaagctgttatttccagccggtcggatgttacgcccggcacgatcgttgccccgcgcaaaggcgataacggccttgtgtggatcatcgtgaatatggatggaaaaggcggaagtgtgacactgccggaagcgggaacagatctgttgacgaaccgtttggaaaaggcggggagactggcggtcggaccgcatgaataccgtgtgattcaatttgacaatcccagctgattctttgcatcgaatcagcttttttctatggagggagagaccgatgaaaaagatcaaatggttatcaggacagccaaaggtgataagcggtgtgacgtggggcgtgccatggaaaaaaggagaattaaaaaagggtgaccgtctggcgcttatgaataaaaacgcggaaacgcgatatgtgcaaaccgaaccgtcggcctattggccggatgggagcatcaagtggacgaagcacgcggcggtgtttggcggtaaggaaaaccaaagctttatagtgcaaaaaagagaagtgccgcagccaactgaatcgctcagcattcttgagacagagcatgacatccaagtgaatacaggagcactcgtttgtaccattcataaaacaggatctgatttcattcaatcattgcagatcaatggaaagccgatcgccgcaggcgggaggctcgttgcgataagagaaacgagaaaggagtcagcggcggaaacggttctatttcaagaagcatctgtcagctttatcaaacgggcgacgattgagcagagtggtcctgtcaaagcagtagtcaaaatcgagggagtgcatgtgctccataaaacgaatgaagaatggctgccgtttgtcatccgattgacgttttatgccgggctgtctgagctcggccttgtgcacacgcagctgattgacaggagcggtaaacaagcatttattaagggactcggcatcgaatttgacctttttttggagggggagccgtacaaccgccatttccggtttgcgggagagaaagggatgtacaaagaacccgcccagctgtttggcacacgtaaattcaatgaacgatatccgctttatgaaaaacaaatcaatggcgaaatgctgtctccagatgaagagcataaggaatggtttgcgtacggaacacagaatgcggtttgggacgatgtgaagcttgttcaggattcaagcgatcattacagcctgtcaaaacggaccggaaaagattatgcgtggatcggcatgctgcatggatgccgggcgaaggggctttgctatgcgggcggagaaaatggcggtgtggctctcggcctgcggtatttctttgagaaatacccttcagcactggaaatcacaggtcttgccggcagccgccccaaaatgaccgtctggctttggcccccggacggcgaagcgatggatttgcggcattatacaggaaacacccacgtggccagcgcgtatgaaggctttgatgaaatgcgctctgatccgacaggcattgcgaacacaaatgaaatcagcctggcgtgcttttcgcacatgccgtctgacgaagtccttaatgcactcgctgacaaatggcaggcgccgccgcttattgtatgcgagccggacgtctattacgaatcaaaagcactcggggtctggagcatcattgacacatcccatccgtttaaaaaagagctggaagaacagctcgacgctgcctttctgttttataaaaaggaagtagagcagcgcagatggtacggattttggcattatggcgatgtcatgcatacgtatgacccgatccggcatatgtggcggtacgatctcggcgggtacgcatggcaaaacaatgagctcgttccgaccctatggctgtggcaggcgtttttccgctcaggcagagaggatatcttccgaatggcagaagccatgacccgccatacgagcgaaacggacagctttcacctcggtgaatacgcaggacttggttcacggcataacgttgtgcactggggatgcggctgcaaggaagcgagaatcagcatggccgggctttataaattctattattatctgacgggtgatgagcggacgggagatcttttgacagaagtgaaggatgccgattatgccctcgtcaaaaccgatccgatgcgcgctttttacgagaaaggcaagcacccgactcacgccagaacgggaccggactgggcggcgttttgctcgaactggctggcggaatgggagcggaccgaaaatcctgattatctccacaaaatccaaacaggcatcaactgtctgaagcggctgccgctccgcttattatctggcccgacatttgaatatgatccggcgacctcgatgcttcatcatatgggagacggcattgcgggcggatatcatatgatcattgccttcggcgcgccgcaagtgtggatggagctggctgagcttcttgatgaccgggaatgggaggatatgctgagtgaattcggcgaattttacacactcagtgatgaggaaaaacggaaaaaaagcggaggcgctcttcatgacgggcattttcactggccgatgttcgccgccggtatgacagcctacgctgcaagaaaaaaacaagatcctcatctcgccgccaaagcgtggaatcttttgctagaagataagctcagccatacgccgcttccgatcaaaccggagcgcatcgagacatggacgcagctagaggagcttccatgggtgacaacgaacactgtctctcaatggtgtttaaatgtcatagcggcgctggaactgatcggagattcccttccggcaaaaaaagaaacatcgggcaaaaaaggataacagccggaatttcataggagaaatggtgcaaaaaatgaagattgcaagaatttatgtaagcgctttatattgagaggggcaaaggggaaatgcaaattgaaaaaagggggacatacgcaacatgaaaataagaatgcgaaagaaatggatggccttgccgcttgctgccatgatgatcgccggatgcagccattcggaaacatccaattcagcaagcggttcgaaagatacgatcaaaattatggcgccgcttttatcgccggaaagcccgagtgataagagcccttcattaaaagcgctcgaaaaatacacaggcaaagagattaaggtcacatgggtgcctgattcatcctacaacgacaaattcaacatcgtcatggcttcaggagagatgcctcacgcgattgtcattaaagataagtcagcgggctttatcaagtctgtcaaagcaggggcgttttgggagctgtctccttatttaaaagactacaagaatttaagccaggcagatgaaaagattttgaagaacagctcggtgaacggcgaggtgtacggaatctatagaacgagggatctgatcagggcgtgtatgatcatcagaaccgactggctgaaaaatgtcggtctggatatgccggaaacgcttgatgatttctatgaagtgctgaaagcctttaaggaaaaagatcctgacggaaacggcaaggatgatacgtacggcatggtcgtgccgaaatggatgggactcggcaacggaagcccatgggatgttctgcaaatctggttcggcgctccgaaccgctacggtgttgaaaacggaaagctgattccggattttacaacgaaggaatacatggatgcgctcacgttttttaaaaagctctatgatgagggcttgatcaataaggactttgctgtcatggattctgcgaagtggaatgatccggttgtaaaaggaaaagcgggtgtcatcgttgatacaggctcaagagcgtctcaaatccaaagcgcgatggaggaggcggatgagtcgaacaaggatatcattgatatcgtcggctcgcttgagggaccgaatggcaagcgcaccttcccgacatctggttattcaggcatgatcgcgataccaaaatcaagcgtcaaaaccgaaaaagagctgaaagaggtgctgtccttcctcgataagatgaatgacaaggaagcgcagattctcacgaacaacggagtgaagggccgcaattacgagctcaaggacggcgtattcacctcacttgaaaaaaacaacaaatctctcctgtatgagcatgaaggcttggcacagttcagcatgtcgattccgaaaagcgagtattacatcgaagaccagaaaaccaagctcttccagcatcgcaaggacatcataaccgaaggagaaaaaatagcggtctttaacccggctgagtcgcttgtatctgatgtctatacccaaaaaggagcccagcttgacaacatcatcctcgacgcgagaacacaatttatcattggagaaattgatgaaaaagggttcgatgatgcggtggagctttggaaaaaaagcggcggcaatgaactgatgaaggacttgaacaaattgtaccaatcgtcaaaataaaccgatgcgcctgcctttcggcgggcgccccggtatcacgaaaggagaacagatatggaaacagtgccgaagaagggagatgcacctgttctcaccgctggaaaaggcatcagctggatggctgcgctcaaacgggacaaatggctttatcttcttcttattcccggtctgctttatttcttgattttcaaatacttgccgatgtggggcgtgctcatcgcttttaaagactactcgccatatctcggtttctggaaaagcgaatgggtcggctttgattatttcaaagacttttttatgaatccggattttttccggctgctgcgcaacaccctcatgctggcgagcctggatcttttgtttgcctttcccgcgcctctcattttggctctgcttttgaatgaggtaagaaaggccgtgtataaaagatgtatccaaacctttatttacgtaccccattttgtatcatggacaattgtggtcagcatcaccttcgttttctttactgtcgatacaggtgtgatcaacaaattgattatgagcctgacaggtgagcagatttctttcttgtcggatgcagactggttccggccaatgattgtgatgcaaagcatttggaaggagacaggctggggaacgattctatttttggcagcgcttgctacggttgatcaagagcagtatgaagcggccatcatggacggagcggggcggttcaggagaatgtggcatattacgctgccggcgatcagaagcaccattatcgttttgttgattttaagaatcggcagctttttgaatcttggctttgaacaggtgtatttgatgacgaactcactcaaccgcagtgtggctgacatcttcgacacgtatgtgtatatgatggggattacccaaggggcgtatagctacagcacggcggtcggtttgtttaaatcagttgtcgggattatcttgatttttggagccaattacattgcgaaaaagtttgatcaggaaggattgttttagaggagggagaggtatggctgaaattcacacgatgcacaacaccaaagccggacgggtgtttgacgtctgcaacattctgtttctcggcggtgtcggcgcgattaccattttgccgtttttatatattatcgccggttcctttgcgacagaagcggaactcgcccagcggagcttctttattttcccgaaaacctttacacttgatgcttacaagtatgtgttttcgacaccaacgttccttcgaagcatgggtgtgtccatcttcatcacggtggtcgggacggctgtacagctgtttttcaccttcacgatggcatatccgctggcgaagcggcatgtgaagggacggaatctgctgttgaatctggtgattttctccatgctgttttcaggcggcatgattccgacgtaccttgtcgtaaaatcacttggccttttggatacgtattgggcattgattctgccgatggcgattaatccgttcaaccttattattatcaaaaacttctttcagcagctgccgcgcgagctggaggaatcagcaaaaattgacggctgttccgaaatcggcgtcttctggcggatcgccctgccactgtcaaagccagttattgcgacctttgcgctgttttatgcggtcgggatttggaatgatttcttccacgctctcttatatatcaatgacagtgcaaaatggccgctgcaaatggtgcttcgccaagtcacaattttatcggatttaacggcgaccaatggtgatacgatgcaaaatgcagttccgccggagcagggaattaaactcgctgtcattgtcattgcgacgctgccgattttggcggtctatccatttttacaaaaacactttgcaaaaggaatgctgatcggttcggtgaaaggctgagaaagggagtgtttcatatcagtacattagatcagattaagattgcctatatcggcggggggtcccaaggctgggccagaagcctgatgagtgatttgtcgattgatgaacggatgtcaggcacggtggcgctctatgatcttgattttgaagccgctcagaaaaatgaagtgatcggcaatcacagcgggaacggcagatggagatatgaggctgtttctactttgaaaaaggcgttatcagccgctgatatcgtcattatttccattttgccgggatcactggatgatatggaagtcgatgtccacttgcctgagcgctgcggtatttatcagtctgtaggtgatactgtcgggcctggagggatcatcaggggcttgcgtgctgtgccgatatttgcggaaattgcccgggcaataagagactacgcacctgaatcatgggtcattaattatacaaacccgatgtctgtctgtacaagagtgctgtataaagtgtttcccggaatcaaagcgattggctgctgccacgaggtattcgggatgcaaaagctattggcggaaatggtcacggaaaggctggggatagaggtgccgcggcgtgaggatatccgcgttaatgtgctcggcattaaccattttacatggattacggaagcctcttatcgccatattgacctgctgcctatattccgtgaattcagcgcgcactatggggaatcaggatatgagctggagggggaaagctggagggacagcatcttttgttcggcacaccgtgttgcgtttgatttatttgaaacgtatggcgccatccctgctgcgggagacaggcatctggcagagtttcttcccggcccatacctcaaacagcctgaagtatggaaatttcatctcacacctatatcattcagaaaacaagacagagcagagaaacgacaagaaacagaacggttgatcgtgcaacaacggggcgttgccgagaaagcttcgggagaagaaggcgtgaacatcatagcggctcttctcggattgggtgaactcgtcacaaatgtaaatatgccgaatcaaggccaggtctcaaaccttcctatacaagccattgtcgaaacaaacgcattcatcacaaggaaccgtgtccagccgattttttccggagcgcttccgagaggtgtggaaatgctggcggctaggcatatatccaatcaagaggcagtgtcggaagcaggtctaacaaaggatactggcctcgcgtttcaagctttcctcaatgacccgcttgtcaggattgaccgcagtgatgcagagcagcttttcaatgacatgctccaatgcaccatgcaacgttgagcggagcttttccggtttagaaaagaaaccattgaccatactgatagtataatcaagaagtaggtgctatcaatatgggagattatttaagtgttgcggtagaattggtctgcggtttaggcattttatttattatcttaaagcttctcgggaaaacccaattttctcaaattacgccgtttgactttatttctgctttaattttaggagaattggtcggaaatgccgtctacgatcatgatatcaaaataaaagaaatcatttttgcttcgctgctgtggggcgtgctgatttatgttattgaatttatcacgcaaaaaatgaaatcatcgcgaaagttcttggagggtgagccgaatatcgtcatccgcaaaggagagcttcaatataaagtaatgaagaaaaataagatagacattaaccagctgcaaagcctattgaggcaagcggggagtttttcgatccaagaagtagaatatgcgattcttgaaacaaacgggatggtcagcgtgcttccaaaatcagactttgacaaaccgacaaataaggatttgcagattccttcgaagtccgtttctctgccgatcacgttaatcatagatggagagattgtgcgggataatttgaaggaagcaggtgtggatgaacagtggctgaaacaagaattgaaaaagaagaacattgataagacagaggacgtgttatttgcagaatggcataaaaataagccgctgtatactgtaacgtacgaacaaagcagatcaacatgactcttagaaaaaagcttgcagcaaggcgcaagctttttattgattgtatgtcccttgtttgacagcacgtacatggtacatgctcacttcagtgctgatcagatagtcaggctttggtttgcctttgtttgctttatggccggcgatatgcgcatcgcttttttcccattgcttccagtgatcctctgattcccagcgaatcatgacaacaacttcttcatcaccgcggcgcacatttttctcaagcactgtcacatcaattaaaccttcttgtttttcaatgattccttcagcgctgaaacgttctataactttatctgcaaagccttctttaaccgtcatttttctcaactgtacaaacatttgtctcactccaatcattctcacatatgaataattgtaaatgaaattcattctcaatgtcaaagaaagcgcaggacggaatcgaaccgccgtgcgcaacagtttattcttttaataaaaacacatttccgtcttcgtccttaaattgaacgaaggtgccccactccatttgattgggctcaccgagaaattctacaccgtttgtcttcattttctcgtatgtaccaaagatgtcttcgcattcaaacacaatagaagccttcatttgctctgagcctttcatcatggctttcgggtaaatgactaaacgagtctcggccccttttggcgcaacctccagccagcttgcttcaggtcccattgggtggtccgctgcaatatcaaagcctaccttctctgtccaaaattgcttcgctttctgctggtcctcgacatatacagcaacagtgccaatttgtttgatcatagggaaacctccaagttgaaaagataataatactataacctgtttacggccgaagtaacataaaaaaatcagccgggaaaccggctgattattaaaatgagcagcttacaacatcgatgtgatttgtgtctaaggcgaaataaacccagcggcgccgtgaggaatcccaataaaagccgccgacggatcttctgccaaggatgatcgggtaaaaccaaaatgagcggccattggttaaccaaacataggtaaatcggaaaaggcaaggacgaatggtgattggttcaactaacaaaacggctccttgagaaccctgcggttttgggggtttcgctggtatttgggaaggaggaggtccctgcggcgcaccgccgaagcctgggctggcaccgctgccaataccagggccggagccgccgccaaagcctggaacagcgccaccgccaataccagggccggagccgccgccagagcccggaacagcgccgctgccaatgccaggccatggatatcggtattcatattcaaaagcaggccaaggctcataaaaatgccccgcaaacatataaggatcaacataatacatgtgataacgtcctttctcattgtaaactgtacattgcagtttatgcgggcggactcttattggtgcattcgcctaaggatataaagctggaatgctctcagagagcataatcatttgatttttctctagtcttattcacaattccgatttatcattttataatgaaagtgcttctattacgaaaaaggagacagaccgtgaatatcgatcaattattatatcaatatatcatagacaacactgcggatattactgagaaatggttcagtttgcgttgccagctaaaaggcgagctatattccgccagccatttaagtgaagaaacgaaaacacttttaaccgagcagcatacatttaccaatataacaatcgcaagcgcatttctggaggatcaaaccgattttcaagaaaacatgacaaaatgggcggaaaacgttgcgaaaaacagggtagagcaggatgttcaagtgcatgaggtcgtagaagccatatccaattctagaatctcattctgggacgcagtcgcaacatttataaaagagaatcaggagatcatcacaaatgaggatgcagaccgatggaaccgcattgtgaatcagtcgttcgataagctgattattgaattctccgagcagtaccaaaaattcatgctgatgaggctcacatctcagcaggaattgatctcagagcttggctgcccggtcatttccattgccgatggaatcgggatattgccgcttatcggctccattgatacaaaacgggcacatgtcattttagaaacagtgccggtccgctgtgtcgagagaaaaatcacaagcctcgtcgttgatctttcaggtgttccgattgtggataccatggtggctcagcaattgtacaacctgtctaaaacgcttttcttattaggcgtcaaagccgtattttcagggattcgcccggatgtggcccaaacatcgattcaattggggcttgattttagtgaatatgaaacgtacggcacgctgaagcaggcattagaaaacatgggtgtccgctgtattgttgaggaattggaagaaaacaaatagaaagtttccaggcatatgattgtccgtcaccgggtgatcatatgcctttttgatttgaacagaaatcaccattgatttatcaaaaaaaacataatattataattcttataagaatactgtgaattaaaacctgttcatcaggggggaaggtcttttggtttcaaaatcaacgattgatccggaagtgattgaaaaaataatcagctcgctggaaacactcgatttcggcaccgttcagattacggttcatgattctcagattacccaaattgagaaaatagaaaagcaccgtttttcgctgaaaaggaaagaatcaaaatgataatgtaaagggcgtttgtttcattaaattctccttaaaacatatacatatttcatccaatttttatataatagacctttaagatcattttttaggaggatttttgacatgcaagctacggttcacgagagtaagcaatcgatcatgcaacgcattttgacagtctttgtcttcactttgctgatcgcgactgtaggcctttttatcggccaatttgttcctgccgctttgatgctgccgctttctattcttgaagtggtgatgattattctggccttctggatgcgcagaagaaaagcggtcgggtatgcgtttgtatatacattcgcgttcgtttccggcattaccttatttccgatcgtcagccattacgcttccatcgccggcgcctatgtcgtgcttgaagcctttggttctacatttgtcatttttgccgtcttaggcacaatcggcgcaaaaatgaagaaggatttatccttcctgtggtcatttctgctggttgcggtgctcgccctcgcagtggtagggattttcaacattttcagcccgttaaactcagcggcgatgatggcgtattccgtgatcggaaccatcgtcttttccctttacattttgtatgatttgaaccaaatcaagcaccgccacattacggaagacttgattccggttatggcgttatcgctgtacctagactttatcaacttgttcatcaacctgctccgcttcttcggcattttgagcagtgatgattaatgaaaaagcgcctgtctttggataggcgctttttttccatacataaaaagggcagatggagtgtttatgagtatcctatcattttaaatacgctggagcaggtcacagtgctggagccatggtacgaagacccgtcatcatcggaggagacgccgcccacgccggtgcgccaaccctggcacaaggagcggcaatggcgatcgaggatgccatcgtcctcgccgaagaactccaaaaccacgccgaccacgaaacagcattacaggcgtactataaaagaagagccccacgagcgctcaaagtccagaacctatcatctgaaatcgtccgccgcaggctgaaaggagagccgggagcggaagaactgattggggagtgctatgcggtgttgagggaagggtattaaataggaaaagtccagaaagtgatttctggacttttttgtttagaaagacacaagtgtttaactaaattatctagaaattgataacaataaatgatgtaaaatcatccggtatttggtaaaattaagtcaaaaaatataagtttctgttagaatatcattatgtaaaatagggggacattatggaaaagtggataggtaaacgccctacaataggtcaaaaaaccttagtaacaaagtatggaagattattacaagaagcagaaatcgcaaccttatcgtcgcaggaaagcgttctaaagattatcgaagctgaatgtgataaaaaaagtggtagagaattaaaagggatattagcacttactacacaatccattttctttgtttctaagcacgaacagatgacttatgaatattcacaaattaatgatattgaagtaaggactaatggaaaagataaaaatagttggagtttaagccttaaaataggccgtaaaaaacgtacattcgatgatattaagaaaaacgatgatagccaagaatttatagagattttagaatacataataactaatcaatcaaaagaaattctaacgacagttacacatgattttgattattttttacatgctgaaaaattaaatgatttacaaaatcgaaatgttaaaattacttcatttctaatgaagagggacaatctaaatctgtcgaaaaatggtgaacgattattgcgtgaaaagcataaaggtgcttccttgatagcggaaggcttttttcaagaggatagacaaagtaagggtaattttattgtactcgacaatcaagtggtgtacttatatgaatttaataataaagaaagaaaagccaaactattaaataagtgggattttaaatatttttctcatgcggttattgatcgatttgcaataaaaacagttatcaatgttacggagacaggaaaaagtttaattataaatctatctggcaaggaatttgtttctattttaaatgatgcaaatattcccctacatcagaagaagaggaaatggtaccaaaaaatcctagggttccgaagtggtaagtggtggaagagagctattgcttcattggtttacctgctgatattactgttaacctttaacgcattttttggtgaaaacaataaagaagctagctctgtaaaatcaagtgataaaacagctgtttcaaagaccgaacaaaaggaagaacagacagaaaatcaaagcaaacaggaaggtaatgaacaacaagataataagagtaagaaagaagaaaaagcaaaaaagcaagcagaagagaaacgtaagcaagaggaagaagcgcgattagcagaagaaaaacgcaagcaagaggaagaagcgcgattagcagaagaaaaacgcaagcaagaggaagaagcacgactagcacaagaaaagcgcaagcaagaggaagaagcgcgactagcacaagaaaagcgtaagcaagagaaagagatacaacaagcagaggcacaagaacaacagacgaatgtctattacaaaaattgtaccgtagcacggcaagctggtgttgcacctatccattctggtgaaccgggatatgctaaacatcttgaccgtgatggtgatggaattgcttgtgagggagtgtaatattaactgtgtaagtaaggaatgcgtacggttccttactcacacagttttttatttgatagaataataagtataaagctaaaggagtggtttcagtggggaaattgaaaagagatccgaactccgtagaattagctaacaagattatcgaacagtatcagcctaaatcagtagaagatatgcaagaagcattaaaagacatatttggtcccatgtttgagtcaatgctaaaaggtgaaatgaatcaccatttgggctatgaatccaatgacaagggagaaaaagaaacaagaaatagaagaaatggatatggcaaaaagatcgtgaaaacaacggcaggagaagttgaaattgcagtcccccgtgatcgtgatggttcatttgaaccgcagttgattccaaagtgtaaaagagatgtatcctctatagaggataaggtcatttcgatgtatgccagaggaatgtcacaacgagacatttcttccacgatagaagacatctatggcttttctgtatctcatgaaatggtatccgacattacggatactgtacttcctaatttagaagagtggcaaaatcgtcccttaagtaactgttacccttttgtgtttgtcgattgtctttacacaaccattcgtaatgactatgaaacgaagaagtatgccgtttacacaatactaggatataccatagaaggtaaaaaggacattctaggtttgtggttgaatgaaacggaaagtaaacataaatggatgcaaatttttgatgaaatcaaatctcgtggtgtagaagatatcttctttctctcaatggatggcgttagtggtctggaagaaggagcacgtgcgatttttcctgatgtgaccgtacagagatgtattgttcatttaattcgaaattcgattaagtatataccaagtaaagactacaagccttttactgctgccttaaagaaagtgtatggagctccaagccttaaggcttgtcacagtgcatttgaatcttttgaaaagcagtggtctacgtaccctggagctgtagacgtatggaaacgaaacttttctcatgtggaacaacttttcgattatggtggtaatattcgtaaaatcatgtacactacaaatgccgttgaaagtatccactctagctttcgaaaagtcacgaaaaaaggagcattcccccatgagaatgccctattaaaaatattgtttttacgaacaaaagaattagaaaagaaatgggatggtggacgcatccagcaatgggctatggtcatgaatcaactattagttcatgaccacctaaaggaacgtgtgaagaaatatctagaataacttacacacttttcttgacaagcccgcttgtgatcgctaattcatatatggttatctaaagaaagagagaatactgaaatattctctcttttattattttcaacaaacgttaatcgtcatttatatttttcccttttatccgctcaatcacctcatgcagcccctcaggcttataaaactccaccggcgaactgcctttctcaaacgaaatcgtctcggcttcaatcagcgcgacatagcgcccgtttacttttgcgagatgaatagaatcgccaaaatccgctagcaatcccttaatctctgtttctccgactttcattttcagctgggcctctggcgtgtgctcgatgatttgggcggaggcttcgatgacttgatgggtgtcgaggcgctcttggatttcccgtttttcgcttgcttcccaaatctcaatgtcgtgctcgaactgcttgagctcttcgctgttgtcttcaaatgtctcgtagacgtgctcctgtaccatgttcatgacctgatttttcatgatttccggcatcgattctccgtactcgacgaatttcagaaagtcctcaaaatagcgggcgtgcgaagcctggtggattttcagctcaccttcctcgaccattccttcctctggcatgtacgggtattggatgcttttcatgttttttgtcgtgatcgccatttcgacttttttaatgagagaagacgcgtcagagatgcgggcgaccttcggctcaaaatcacatttcataatgaagacaaatgactcgtcaaagtattttctcggcacggccgaagcgacgagaaacacgccgccgcgaaccgcgcttgtgtcgaggtacgtgcggacgaactgctcactcagctcattgaagtcttcttttgtttccgccagacgcgcgcggttgaacatgttgtagtttgggttggaatcgagctcgtggccgggttcgacgataaaatggccgattttcgtcgggacctgctcggactgcggatggcggtcggctttccgtttgacgatttttttcagttccccgtcgagaaagtccttcagctcgctttcttcaaattcgcccgtatcaagggtctggaagtgcttgaactgcttgttcgcctgctcatctttgccttccacctgtatgacataaaaggataaaaaccgaatttcaaaatccatatataaactcaccttattcgcgtattgtacagcttctcaagtatagaaaaaacagcgatcatgcgtcaattgggagaataatcatgaccatgaaagggaaatgtaatcaaatagaaggcatctcatacggaaaggaatggttcgatgaaggaaacaagcccgattcctcagccgaagacgtttgggccgctcggcaatttgcctttaatcgataaagacaagccgacgctttcgctgatcaaactggcggaagaacagggcccaatttttcaaatccatacacccgcgggcacgaccattgtagtgtccggccacgaattggtgaaagaggtttgtgatgaagaacggtttgataaaagcattgaaggcgccttggaaaaggttcgcgcattttccggtgacggattgtttacgagctggacgcatgagcctaactggagaaaagcgcacaacattctgatgccgactttcagccagcaggccatgaaggactatcatgagaaaatggtcgatatcgctgttcagctcattcaaaaatgggcaaggctcaacccgaatgaagcagtcgatgtcccgggagatatgacccggctgacgctcgacaccattgggctatgcgggtttaactaccgctttaacagttactacagagaaacgccccacccgtttatcaacagcatggtgcgggcgcttgatgaagcgatgcatcaaatgcagcggcttgatgttcaagataagcttatggtcagaacaaaacggcaattccgccatgatattcaaacgatgttttcgttagtcgacagcattattgcagagcgcagggcgaatggagaccaggatgaaaaagatttgctcgcccgcatgctgaatgtggaagatccggaaacgggtgaaaagctcgacgacgaaaatatccgctttcaaatcattacgtttttgattgccggccatgaaacaacgagcggcctgctttcctttgcgacttactttttattgaagcatcctgacaaactgaaaaaggcgtatgaagaggtcgatcgggtgctgacggatgcagcgccgacctataaacaagtgctggagcttacatacatacggatgattttaaatgaatcactgcgcttatggccgacagctccggctttcagcctttatccaaaagaagatacagtcattggcgggaaattcccgatcacgacgaaagacagaatttctgtgctgattccgcagcttcatcgtgatcgagacgcttggggaaaggacgccgaggaattccggccggaacggttcgagcatcaggaccaagtgcctcatcatgcgtacaaaccattcggaaatggacaacgggcctgtatcggcatgcagtttgcccttcatgaagccacacttgtgttaggcatgattctaaaatatttcacattgattgatcatgagaattatgagcttgatatcaaacaaaccttaacacttaagccgggcgattttcacatcagggttcaaagccgtcatcaggaagccattcatgcggacgtccagacagctgaaaaagccgcgcctgatgagcaaaaggagaaaacggaagcaaagggcgcatcggtcatcggtcttaacaaccgcccgcttctcgtgctgtacggctcagataccggcaccgcagaaggcgtcgcccgggagcttgctgatactgccagtcttcacgacgtaaggacagagacagcacctctgaacgaccggattggaaagctgccgaaagagggagcggttgtcattgtgacctcgtcttataatggaaagccgccaagcaatgccggacaattcgtgcagtggcttcaagaaatcaaaccgggtgagcttgagggcgtccattacgcggtatttggctgcggcgaccacaactgggcgagcacgtatcaatacgtgccgagattcattgatgagcagcttgcagaaaaaggcgcgactcggttttctgggcgcggggaaggggatgtcagcggtgattttgaagggcagcttgacgagtggaaaaaaagcatgtgggcggatgccatcaaagcattcggacttgagcttaatgaaaacgcagataaggaacgaagcacgctgagccttcagtttgtcagagggctgggcgagtctccgctcgctagatcgtacgaagcctctcacgcatccattgccgaaaatcgtgaactccagtccgcagacagcgatcgaagcactcgccatatcgaaattgcattgccgccggatgttgaatatcaagagggcgaccatcttggcgtattgccaaaaaacagccaaaccaatgtcagccggattctccacagattcggcctgaagggcaccgaccaagtgacattgtcggcaagcggccgcagtgcggggcatctgccattgggccgtcctgtcagcctgtatgatcttctcagctacagcgtcgaggtgcaggaagcagccacaagagcgcaaatacgtgaactggcggcatttacagtgtgtccgccgcataggcgtgaattagaagaactgtcagcagagggtgtttatcaggagcaaatattgaaaaaaagaatttccatgctggatctgcttgaaaagtacgaagcgtgcgacatgccgtttgaacgatttttagagcttttacgtccgttaaaaccgagatattattcaatttcaagctctccaagagtgaatccgcggctagcatcgatcacagtcggcgtcgtgcgcggccctgcgtggagcggccgtggcgaatacaggggcgtggcatcaaatgatttagctgagcgtcaagcgggtgatgatgtcgtgatgtttatccgcacaccggaatcccggtttcagcttccggaagaccctgaaacgccaatcattatggtcggacctggcacgggagtcgcgccattccgcggtttccttcaagcccgcgaagttttaaagcgggaggggaaaacgctcggtgaagctcatctctattttggatgcaggaacgatcgtgattttatataccgcgatgaacttgagcagtttgaaaaagacggaattgtcactgtccacacagccttttcccgcaaagaaggcatgccgaaaacgtatgtccagcatgtcatggctgaccatgcagaaacgttaatatcgatccttgaccgcggaggcaggctttatgtatgcggtgacggcagcaaaatggccccggatgtggaggcggcactgcaaaaggcgtatcagtctgttcatggcaccggggagcaagaagcgcaaaactggctgagacatctgcaggataccggtatgtacgctaaggatgtctgggcagggatatagataaagaagactggagacatccagtcttttttgtcctttagaaaaaatggtgatcgcgctaaacattgatgcatacaataacttcagtccgccggaagggcgggctgtctgcaaaacctatttttcgtttttgctagtttatgttattcttatactcggtatctatttcttttttcaaaggcacacatgacaaaagaaatcctttttttatttccgagaaaaaaatgtgaaacgaaatgaaggtttctttcgtccagtgattggtttccaaatggttgtaataaaaatgatatggtgcgaaacataaatattccggcttgccgcggtgtatttcttgttgtgtgatgccttgattttgtttggaaagaaggaattggaaggcaggatataaagagcaggtaaatatgaatgaagaacttaaagtgtttaagaaagtagaggttgccatgaagaaacttttttcttacaaacttagcttttttgtgctggctgttatactgttttgggcaaaaacgtatttatcctacaagactgagtttaatcttggggtaaaaggcacaactcaggagatcctcctgatatttaacccattctcaagcgccgtcttctttttaggactggctttgctggcgaaagggcgtaaatcagccattattatgctgattatcgatttcttgatgacatttgtgttatatgcaaatattttattctatcgtttctttgacgatttcttgacgttcccgaacattaaacagtccggaaacgttggaaacatgggagacgggattttcagtatcatggccggtcatgatattttctatttcttagatattatcattttgattgcggtattgatctggagacctgaattaaaagaatacaaaatgaaaaaacgctttgcgtctttagtgatcctttctgggatcgcactgtttttcatcaacctgcactatgcggaaaaagaccgtccgcagctgctgacaagaacgtttgaccgcaattatatcgtgaagtatttaggtctgtacaactacaccatttatgacggtgtgcagacggctcaaacagaaacgcaacgggcctatgcaagcagcgatgatttaacaagcgtcgagaattacacgacgtctcattatgcgaaaccaaacgccgagtacttcggctctgccaaaggcaaaaatatcattaaaattcacctcgaaagcttccagtcattcctgattgactacaagctaaacggtgaagaggtgacgcctttcttaaataaacttgcgcacggcggggaagatgtgacgtattttgataacttcttccatcagacaggccagggaaaaacatctgatgccgagctgacaatggataactcgatcttcggtcttcctgaaggctccgcgtttgtgacgaaaggcgaaaacacttaccaatcgcttcctgcgattttagaccagaaggaaggctatacaagcgccgtcctgcatggtgattacaaatcgttctggaaccgtgaccagatttacaaacatatcggatatgacaagttcttcgacgcaagcacgtatgatatgtcagatgaaaatgtgattaacatgggacttaaggataagccgttctttacagaatcgattccaaagcttgagtctcttaaacagccgttttacgcgcatttgattactttgacaaaccattatccgtttaacctggatgaaaaagacgcgtctcttaaaaaagcgacaactggcgataacacagttgacagctacttccagacagcgcgttaccttgacgaagcgcttgagcaattcttcaaggagctgaaggaagccggcctgtatgacaactcagtcatcatgatttacggtgaccataacggtatttctgaaaaccataaccgagcgatgaaagagattcttggaaaagagatcacagattatcaaaacgcacagaaccagcgtgtgccgctgatgatccgcgttcctggcaaaaaaggcggagtgaaccatacgtatggcggcgaaattgacgtcatgccgacacttctgcacttagaaggaattgattctcagaaatacatcaactttggtactgacttattctctaaagaccacgacgatacagtggcattcagaaacggagacttcgtaacgccgaagtacacatcagtcgacaatgtcatttatgatacgaagactggtgaaaaactgaaagcgaatgaagaaacgaagaatctgaaaacaagagtgaaccagcagctgagcctttcagacagtgtcctgtacaaagacttgctgaggttccataaactaaatgatttcaaagccgttgatccgtcagactatcattacggcaaggagaaagaaatcaaataagatgaaaaagagccttgagcgggcgcattgccttcgctcaaggctcttttttttggttatacaaccaacttgaaaaaatagattccatttggtcaccaaggctggctttctctcatatcattacagtagattttgaaaccggtattgaaatcggacaaattatcggggaaatgccttgatagattgtgaagatgtaccaggtttcgaactcaatattcatagagatgaggggtagagatgaaagcggtcattctctgcggcggaaaaggaacgagaatgagtgaagtcacgaatgacattcctaaaccgctcgccatgataggcggcaaaccgattctatggcatattatgaaaatttatcagtactacggagtaaacgagtttattctgctgttgggctataaaggagaaaaaatcaaggaatactttctcgactatgaatggaagcacaacagcctgacactcgacagctctacgggagaggtacagatcctggggcagcctgaaacgtggaaaattacgtttttggagactggggaagatacgctgacagccggaagaatcttgcaggcgaaagactatatcggtgatgaaacatttctgctcacctatggggacgggctggccaatatcaatcttttccatctcatcagctatcatcagacaaaaggtgctgccgcgactgtcaccggaattgacaaagtctcgcaatttggcaccttgacggttgaggacggcatggcgaaaacattttctgagaagacatcaagtgacggaatcatcaacggtggattcttcgttctcagtccaaaggttttcgattatttgccgaaggacggaaacacgatgttcgaagatgaaccgctgaagaaccttgccaaagacggggagcttgctgtgtaccgccattacggattttggacggccattgatacgtataaaaatctcttagaagtcaacaaaatgtggaatcaaggacaacaagtatggaaggtatggtgaatcgatttgagtttctggaaaaataaaaacgtatttgtcacgggatgcacaggtcttttaggaagctatttggtgaaagagctgatcgatcagggcgcaaacgttacggggcttgtcagggatcatgtgcctcaatccaatctttatcagggagaacatatcaagaaaatgaacatcgtgcggggctctcttgaggacttggctgtgattgcacgcgcgcttggcgagtatgagatcgacactgtctttcatcttgctgcacaagcgattgtcggcgtggcaaaccgcaacccgatttctacctttgaagcgaatatcctcggcacctggaatattctcgaagcctgccgcaagcatccgttaattaagcgggtcattgtcgcttcaagtgataaagcttacggcgatcaagaaaaccttccatacgatgaaaacatgccgctgcaaggcaagcacccgtacgacgtctcaaaaagctgcgcagatctgatcagccacacctattttcacacgtacgggcttccggtctgcattacgcgctgcggaaacttatacggcggcggagatttgaacttcaaccgcatcattcctcagacgattcagcttgtgctgaacggggaagcgccggaaatccgaagcgacggcacatttgtacgggactatttctatattgaagacgccgttcaggcttatctgcttcttgcagaaaaaatggaagaaaacaatcttgccggagaggcctttaacttcagcaatgagatccagctgaccgtacttgaactggtagagaaaatattaaagaaaatgaacagtaatctgaaacctaaggtgctgaatcagggaagcaatgaaatcaaacatcaatatttatccgcggaaaaagcaagaaagctgctgaattggacaccggcctacaccattgatgagggacttgaaaaaacgattgagtggtatacggaattcttcaaaaagtaatgtgaaacgaggtgaacaagactgtgaccagcgcgtattgcaccgttttatcaaaaggaagattatatcaggcagtcgctttgtttaagtcgttagagctagttgatcaagacagtcccatttttatactttgcatggatgaagatacgcaccgcgtgttacagaagctgaagatgaagcagctgaaccttgtgccggtggccgctcttgaaaatgaattgcttctgaagctgaaggaaactagagatcaaagtgagtattgctggacgatgaagccgatctttctgcaagctgtgctgaatagcaatcccgggctggagcgtgtgacgtatattgacggggatctctttttctatgcagatccatcgccgatttttgaaaaccagccggactgctcggtgctgctttcacggggggatattgtaatcccttcttttgagaaagagcagattgacatgctgcagcgtcttttaggcagatataattccgggtttattagcttcaagcatgatgatgcaggcacggattgcttggagtggtggaaggaacgctgtcttgaggaatgcaaaaatgcaccgggtgaaggaaaattcggtgatcagggctatttggattatatgtctgagctgtttccgaatgtgtgtgacattacaacacccggcgtgaacatcgggcattggaattatgggcagcatacgttttcctggaaagatggccggatcgtgctggaggatggcagtccgctgatcttttatcatttcagcggataccgaatcgtcagcatcaatgaaatcaaacagattcatgaaacaacccgcacagatctgccgtttgtgcatgaactgtatcaagagacactgccgcatatcattcagcacatcaaaacgttagaccctgaatttaacggttttgcttcaaaagatgacaacaaataaatgagtaaatacaggaagtgaaaatgaagtgaaagcaagcgttattattcctgcatataattcgaaggagcgtctttacaacagccttctgtcattaaaccagcaggagtgcgatgaagaattcgaagtcattgtagcggacaatggctctgaggacgggacgctctcgatgcttgagtcatttcaagctgattttccgctgatctttacacggattaaagaaaacaggggcattgcgtacggacgaaatcaggcgcttcgcaatgccagaggagacatcctgattttccatgacagcgatatgcttgcggcaaaggaccttgtggcaaaacatattaaagcccatgagaacgaagagaatctcgtcgtgtgcgggttgttttggaaacggatctacagtttttattatgaacggtttgaagaagaacataaggaacagctcgcaaagctcacaggtgaaatgtcgaagaaagacaaacaaaagctgctggaggaggcggacatcaaaaacggaagctttcttgataaaagctttgacctcgataccgactttatagacgtgctcaagaagattttagatgagtacggcgatgacttgaaaggctatcatatgccatggcgcttttttatcacgaataattcctctgtgaaacgcaagcatgtggttgacctcggtttatttgacgaaggcattgtgcggtacgggtttgaggattatgacctcgggatcaggcttcatcaggccggattgaccttcaggcttcgccgcgatattgtcagtgttcatcaggaacatccaagcaattgtaagtctgtagatgatattcgggccaacattgcctatatgtgcgataaatacaataacatccgctccttagacgttcatctcgcttttaatggaccgttcccgcctgacatgacgaacagaatcatgactgatattcaaaagctgctggagtctcagaaatatgatatgctgctgaatctgtttcttgagcttctacatgttgttaaagagcgcaacattgatccggattggcgaaagaaagccccaagggtgacggcgaaaagctttgatttacaaactgtccgcaagcttctgccaaaagcgaagaaaaagctaggcgtgaacgattttgccaacgcactgtatgcgcttgtcaacgatttgctgcacgtggatcttagatcattggatgtggtataagtgagtacatttcatttttcaacgatagtgtcaaggacacatatctttaagctcatgcctatgattcattctctccatgagcattgcgatgattttcatttatatgtgctgtgtgtcgaccagaaagcgtatgaattgcttcagcacgtgccatgggagcatgtaacctttgtgcagctgcatgaaatggaagacccggagctgctgaaagcgaaaagcaacagaacgtttcatgaatattgctggacgttaaagcccgcctttttgtttcatgtgatgagcaagtgggatgacgctgaatactttgcccatatggatacggatctatttttcttttctgatccggcgcatatttttgcagaaaacccaacggcgtctctgtatttgactgatcatcgtaattcgccgcgcttcatgtcctactacgaccgaaccggacgctttaatacaggctttgtcggtgccggtaatacaaaggaagcatatgaagcggtgtggcagtggagacaggactgtattgaattttgcacggtcgaaatggatacggaacgaaagacatatggtgatcaaagatatgtggagaaatggccggagcagtttaaaggtgttcatgttgtcaaatccataggagccaatacagcgctttggaatatcgaaaactataaggtcgggcaaaaggacggccgcgtgtatatagatgaaacgccgctgattttctatcatttctctgggtttacactggtgacagaaaaagagtttaatctttgctggtactatcggattgaagacgaagcgacaattgagatgatttatatgccgtatatattaaatctgaaaagatggattgatgaaatacagtcggcgtttccggactttgcggatggctttatcccgaagcacgcagtgcctgacactcattttatccagctggattaaaaaacccctgccgcctggcaggggttttttcagctatgccattctctcagcttctggtcacttggcaataggaaggcaaggatgccgagaacagggagaaaggcaatggcgatcatcgtcggggtcagtcccgctgcgtcaatcagagcgcccagcgccacagcgccgatcgcgcccatcccgaaggcaagcccgacggttaaaccggacattgtgccgatttttccaggaactagctcctgtgcgtagacgaccgttacagaaaagctcgacatcagaaccaagccaatcaatgcgagcacgccataggcgagaaccgggccggcaaatggcagcacaatcgccagcggcgccgagcataacagcgaaccgaggataacgaagcgttttccaaaacggtctgcaagcgggccgccgagaaacgtgccgattgcaccgaacagcaagaagacaaaaatatagctttgtgcctgctgaatgcttacgtgataggtatccatcgcgtaaaacgtgtaaaagttaccgatcgcactcgtataccaagaacgagcaaaaatgagaaatataataataataagagcagatacaacagatttggtgatggccgtgttttcagccgttttcttttgtttgcctgatttctgggcaaggctgccgagacgtgaggcgtaccatttcgcaatatacatgagaaacaaaacagcaagcgcggcgacaagcgtgaaccaaacagcgccgaattgcccgagcggtacaaggatcagcgcggtgatcagcggcgccatcgcctggcctgagtttccgcccacctgataaatcgactgggcgagcccgcgttttgtgccggcggccatatacgccacacgggagccctccgggtggaaaatggccgagcctaatccaatgaaaaacacacagcataggatcgttatgaatgacggggcaaatgcaaggcctaaaatgccaagcatgctggcggtcaaaccgactggcagcgcatacggccgcggccgtttatcggtataccagccgacaacaggctgcatgacggatgacaccatgtttaatgtgaaagcgatgatgccgagctgtgtaaacgtcaggctcatggagcgttccaaaatagggaacatggccggaatcacagcctgaagcgaatcgttgagcatatggcaaattccgataataatcaaaatcggatacaccgtggtgcctggtttttgaactgttttttcttttaacggggcggcgatagccaattgagtctcctccttacatatataaccaaagcataccaccatattattcataaggtgaagaatttatcaagaggaaaaaagattcttatgaaagaaataccgtcagcctgattaggagctgacggtattttcgatattcaaaatgtgatatagctcttcaagcttacgaatctcataggttggtatgatctctggcacattcggcttcatgtcagggttcatccaacaagtgtcaagtccggcgagctgtccgcctttgatatcagcagtcagtgaatccccaatgattaatgtgtgctctgctgaaaattgaggaatccgttcaaatacgtaatcgaaatattccttcatcggcttttggaagcctgtgtcttcagaaacgaaaatgtccttgaagaatggaaataatcctgaatcacggagacgcttatattgtgtgttagacacgccgtttgtcacgatgtacaaatcaaactgttgctgcagatttgagatgagatcaaatgcaccgtcaataagctgatgtccttcttcaagaaagcggcggtatttttgctcaagcaaagcgccgtccgcttcgtaaacgtactccttgagcaaagcggagaaacgtgtgtttacgacttcatcccgtgtcatcttaccttcttcaaaggctctccagagaccttgattgctggttttatactgcgccttcatgtcatttgttaaaggaatgttctgatcttcaaacagcaaacgcagggctaaagcttctgccgcttgaaaatcaaggatggtatcatctacatcaaataataaagtgcggtatcgtttcatctgtgtgtctccctttctcatatgtattcaaagtatagcacataaaaaaaggaaaaagccggcgggtgaggcaccgccggctgaaaagagattatttgtttaataagctgtgttttctcgaatataggaagtaaaccagcgttccgacagcgatccagatgacaaatgaaagccatgtgacgccgggaaggctgtacatgaaccaaaggcagatgcctgcgctgataatcggcacaaccggaacgaacggcactctgaaggacgccttgatttcaggatgtttctttcttagcacaatgacagcaatagatatgaccgtaaacgcggcaagtgttcccatgttcaccagatgggccagcgttccgaggttaataaagccggcgattcccgctgcaacgatccctgtcagccatgtgttgcggaacggggttttaaatgacggatgaacctttgcgaacaatccaggcagaaggccgtctctgctcatggcaaatgtcaaacgaacctgagcgtacagcaaagcgagcatcaccgtcgtaatcccgataatcgcaccgacagaaataattccggcaacagcgtcctgtccgacgaatttcagagcaaaggatacaggatctccgacattcaatttggcataaggcatcatgcctgtcagcacaagcgataccgcgatgtacagaaccgtgcagacggctagagctgaaataatgccgacgggcatgtttttttgcggatttttcacttcctctgacgcgttagaaaccgcgtcaaacccaaggtacgcgaagaatacagtggcggcgctaagtatgacgcctttcatcccgaaaggcataaaaggagaccagttatccggtttcacatagccgatgccgacaataatgaacaataatatgatcgcgattttcatcagtacgatgacgttgttaaagcgtgtgctttccttgacgcctctgctgacaatcgcagtgatgaggagaatgatcaccgcagccggaaggttaaatacggcgcccgccgtgcttcccggcgctcctgtcagtgcagccggaatatgaagattgaagccggcaagcagtgattgaaagtatgaagaccagccggtggcaaccgccgacagtgcaatgacatattcaagcatgagatcccatccgatcaaaaaggcgagcagctctccaagtgtcacgtatgagtaggagtacacgcttcccgaaatcggaatggaagacgaaaactcagcataacagaaagcagccagcgcacaggcgagccccgctaaaataaacgatatgatgagggcgggacctgcaccggtcgctgccactgttcctgtaatgacaaaaatccctgtaccgatgacacaaccgataccgagcaaggttaaatcaaatgcgcttaacgtacgggcaaggctttttgacttgctctgcgcactcaatgtttcaagcggtttttttctaaataatgaactcatcaaaagttcctcctgtaaatattcaaaatattctaatcattatatacagttcttgttgtattatattgtcgaaatttgacgcagtcaataaaatatttttctgctttaaatgatagaagcgaaacagcgttgtcgtatcataggatagtaatttttactaatcgtatattcaattttatgcaagatgaaccgatagaaaaaatagattcgcccatattttgatttgcggttataaaggagatgctgaccatgtttcaatatgaagagttgaataaacagtttatcggcgggaaatggcaggagggcagcagcccaaatgtattggaaaacaaaaatccttatactcaaaaaacattcacaacattccgtaaagcgactgctgacgatgtagatgaagcgtatcgggcagcggcgctggcaaagaaaaaatgggatgcggtcaacccgtttgagaaaagaaccattttagaaaaagccgtcacgtatattgaagaaaatgaagaagccattatttatttaattatggaggagctaggcggtacaaggctcaaagcggcttttgaaatcggacttgtcaaaaacatcatgaaagaagcggcaacgttcccaatccgcatggaggggaaaattcttccgtccacaatagatggcaaggaaaacagattatatcgtgtgccagcaggcgttgtcggtgtcatcagtccgtttaacttcccattctttttatctatgaaatcagtggcgcctgcactcggagccggcaatggcgttgtgctaaagccgcatgaggaaacgccgatttgcggcggaacgctgatcgcgaaaatttttgagaacgcgggaattccagcggggctgctgaatgttgttgtcacagacattgcagaaatcggcgacagctttgttgagcatccagtgccgcggatcatctcatttaccggttctacgaaagtcggcagctacattggacagcttgcgatgaagcattttaaaaagccgcttcttgagcttggcggaaacagcgccttcatcgtactggaggatgcagatatagaatatgcggtcaatgcggcggtgttcagccgatttacacatcaaggacagatttgcatgtcagccaaccgcgtgcttgttcattcttctatttatgacaagttccttgagctgtaccaggcaaaagtggaatcgctgaaagtcggcgacccaatggatcctgatacgattatcgggccattaatcaacagcagacagacggacgggctaatgaagactgttgagcaagcaattgaagaaggcgctgtaccagtgaagcttggcggatttaacgggacgatcgtggaaccgacgatcttaaaagacgtcaaaccgttcatgagcattgccaaggaagagctgttcggaccagtcgtctcctttatgaagtttgattcagaagacgaagcggtggatatcgcaaacgaaaccccgtttggcttgagcggtgctgtacatacgtcaaatcttgagcgcggcgtggcatttgcgaaacgcattgaaacaggcatgattcacgtcaatgacacgaccatcaatgatgaaccgaatgtagccttcggcggtgaaaagcaatcaggcctcggccgtttaaatggtgagtggagcctcgaagaatttacaacgctgaaatggatctcggtccagcacgaaaaacgcagcttcccttattaatgaaaaggagtgaatggaattgaccataaatacggaaaaagaaaccgcagatattctggacgcatttatcaaagtagccccttatttaaacagcctggttcaggatgatattacaatcggcatttatgatacggaaaaactgctcgtgaatataccggccaaaaccttttcgctgaacgtaaaagccggcgatccgctgcaggaaggggatatcatcacagatgccatccgaagcaatcagaagaagacgagcatggttccgaaagaattgttcggcttcccattgatcgcgcgtgccatcccgctgcacgacgagaatggaagagtcattggaggcgtcggcctcggaacgagccttgaggagtcgtcaaagctgcatgatgtcgcggaaagcttatcagctgtcgttgaacaaacagccgcggctatttccgacatttctgaatcaattaacgggttttcaactcaaatgtcgggcatttcctctcaggcgaaaaaagtaagcgaaagcgccggtgaaatcgccgatatttcagtaactgttaaaggcatctctgaccaaagcaatctgctcggcttgaatgccgcgatcgaagcggcaagagcaggggagtccggaaaagggttctctgtcgtcgcagatgagatcagaaagctagcgacgcattcaaaagaaaatgtcggccaaattgaccagattacgaaaaaaatccacagcctgctgaaagggctggaggaatccattgagtcgattaaccagcatacagacggacaagccgctgccgttgaacaaatttccgccacgatgcaggagatttcaggaagcgcgcagcatcttgcaaaaatggctgaaaaagcgcttgaggaagagtaagagaccggggacaaacatccccggtctttttcttatcctgcatttccatgaaattcgtctgacgttttactagttttattccagcggctgatttaaaatgtacacatgaacttacgtgaggattgataggaaccatgagcatattaaaagcggaaaatctttataaaacatacggagataaaacattatttgaccatatctcctttcatattgaagagaatgagagaatcggattaatcgggccgaacggaactggaaaatcaacgctgctgaaagtaattgccggcttggaatctatcgaagaaggagaaatcacgaaatccggaagcgtgcaggtcgaatttcttcatcaagacccggagctgcctgcggggcaaacagtgctggagcatatctattccggtgaatcggctgtgatgaaaaccttgcgtgaatatgaaaaagcgctgtatgaactggggaaagatcccgaaaatgaacagcgccagaaacacctgctggcagcacaagcgaaaatggacgcaaacaatgcatgggatgcaaacaccttggcaaaaaccgtattgtctaagctgggcgtcaacgacgtaacaaaaccggtcaatgagctctcaggcggccagaaaaaacgggtggccattgccaaaaacttaattcagcctgctgatctgctcattttggacgagccgacaaaccatttggataatgaaacgattgagtggcttgaagggtatttaagccaatatcccggcgccgtcatgctggtgacgcacgatagatatttcttaaaccgtgtcaccaaccgcatttatgagcttgaaagaggcagcctctacacgtacaaaggcaactatgaagtgtttttagaaaaacgtgcggaacgggaagcgcaggctgagcaaaaggagacgaagcggcaaaacctgctgcgccgcgagctggcctggctcagacgaggagcgaaagcccgctcaacaaaacaaaaggcgagaattgaccgggtagagacgcttaaagagcagaaaggccctcagtcatcaggttcactcgattttgccattggctcgcaccgtctcggaaaacaggttattgaagcggagaacgtcatgatcgcttatgacggccgcatgctcgtcgaccgttttaatgaacttgtcataccaggtgaacggatcgggatcatcgggccgaacggcatcgggaaaacaacgctgttaaatgcccttgccggccgtcatacgccggacggaggcgatattacgatcggacagacggtcagaatcggctactatactcaggatcatagtgaaatgaacggtgagttaaaggtcattgactatataaaagaaacggcggaggtcgtaaaaacggcagatggcgatatgattacagctgaacaaatgctcgagcgtttcctcttcccgcgttcaatgcagcagacgtatatccgcaagctgtccggcggggaaaaacgccgtttatacttgcttcaggttctcatgcaggagccgaatgtcctgtttctcgatgagccgacgaacgatttggatactgaaacattaagcgttcttgaggattatattgaccaattccctggcgtcgtcatcaccgtatcccatgaccgctatttccttgaccgcgtcgtcgaccgtttgattgtatttgaaggaaatggcgtcatttcccgctttcaaggctcctatagcgactatatggaggagtcaaaagcgaaaaaagcggcccaaaaaccgacagctgaggaaaaaacggctgaagccgagccgaagaaaaaacggaaaaagctttcttacaaagaccagctggaatgggacggcatcgaagataaaattgcccagctggaagaaaagcatgagcagctcgaagctgacatcgccgcagcaggcagtgattttggcaaaatccaagagctgatggccgagcaggcgaaaactgcggaagagcttgaggctgcgatggaccgctggacagaattgtccctcatgatcgaagaactggaaagctaaaaagcgtggccgcagcaggccgcgctttttttcacataatggacaaaaacgaaccggcctgcttatgttaggataaaattgtgtgtcagcggcacatggaaaactaacggagatgatgaagtatgacatgggcgatcgtgatgttaattctcatgagtctggtgaaaatcgtattaacctgtcttcctacaggcgtcatagaatggctgctcggcaaatttgaagtgcacgccaagcttagtggcgaaaatgcgagtctctctctagatggaaaacgtctcgagggtacagagaagcagaaagtgattgatcaatttaacgaagctgtcttcctggagaaatattatatctatccaggtgatgaagagcgttatttacatccggaaaatggcggcacgccgctggtgatagatacaaaaaaaggaaaaaaagacgtgaagctgttcgtgtaccgctacgacgaccatatcgacgtcgtgaaacagtacaagaagaaagtgatcgcgtatcgagtgctttctgaaagccttcaaaaagagtctctgtcagtggcgggaagtttagcttaaacaggaaagtgaaagacgggtgctttatgctgctcgtcttttttattgttttttaaaacttaacgtttacgttaaggttcaaaaggtgtataatggtaacagaaacggcgaagggggatttaccttggaatggatgaagattgatcaagtggccaaaagaagcgggctgacaaagcggaccatccggttttatgaagaaatcggcttgattccggcgccgaaacggacagacggcggtgtaaggctttattcagaggatgatatggaggagcttgagaaagtcatcagcacaaaagaggtgctcggtttttcccttcaggagcttcagcatttcatggaaaccagccgccagctagagttaaacaaagaggggtatttgttgtcactggatcctaaggaacggaaagaaaaactggaggaaattcaggaaaccctgaatcaccagctgagtttgattgatgagaaaatccgcacattccaaagctttaaagaacgcctgcaaggcatgaaaggtaaagcggaacgcgccattcaatcaatcgaatgaaaagtttgttaaacgctatttttgtagcgtttcttttaatggaataaagatggaggttaggtcaaatggataagacaacacaagtgaatcagaaaacgggtttgctcagccagccaaaagcggtatgggctgtcgcatttgcctgtgtgatttcctttatgggaatcgggctggtcgatccaattcttccggccattgccgcacaactacatgcttcacctagtgaagtatcactcttgtttacaagttatttgcttgtaaccggatttatgatgtttttctcaggagccatttccagccgcatcggcgcgaaatggacattaattctcggacttatttttattattgtgtttgcggggcttggcggcagctcaagctcaatcgctcagttagtcggctatcgcggcggctggggattagggaatgctttgtttatttcaacagcgcttgcggtcatcgttggtgtatcagtcggaggaagcgcccaagcgattattttgtatgaggctgcgctcggtctcgggatttccgtcgggccgcttgcaggcggagagcttggaagcatttcatggcgcgcaccgtttttcggagtatctgtcctgatgtttattgcgttaatcgcgatttctttcatgcttccgaaattgccgaaaccggcgaaacgcgtcggtgtgtttgatgcgatgaaggcgctaaaatataaaggccttttaacaatggcggtatcggcattcttatacaactttggattttttattttgcttgcttattctccgttcgttctggatttagatgaacacggtcttggatatgtcttcttcggctggggccttctgctggcgattacgtcagtctttacggcgccgctcgtgcacaaagcgctgggcacagtgcgttcgctcgtcgttctctttatcgcctttgcggctattctcgttattatggggatctggacagaccatcagactttgattattacatgtatcgttgtcgctggtgctgttctcggtatggtgaatacgatcatgacaaccgctgtgatgggttctgcgccggttgaacgttcaatcgcgtcttcagcctacagctcagtccgcttcatcggcggcgcgctcgctccgtggattgcaggaatgctgtcagaacactttactgcaagcacaccatatacagtaggcggaatcgtcgtttttgtcggcatgcttgtccttctcatgggacgtaaacatcttgctggaattaaggcggggcattaataacgaaagacactgcacagatgcagtgtctttttttaatcgtggaatcttcccattactaccgtattgtagtaatttccgtaagaaagcaatttctccttttttaagattccttttcgtttgtttccaggacattcagtgagatttttttaactccgttgatggttcatactgtagaggggacgtttgccatggataaggcaaagccagacgaatatgatcagaaatgtttagaaacgctctatcaatacatacacagcgtcatgaaaaacagcttttcgcccgagtggtttaccgcttgggcagatgaggaggattttgagctgtctgccaaaagagagctgacacttgatgaattcacatctccattgcagctcattttaaaagacagagagcttttgagagtcgttcagaataaatggcagtaaaaaacccgccctttagcaggcgggtttttttataaattaaagcactttcgtcgtccaagactcgcagttccacgtttctgtcgcgatatccatataaaagtctggctcgtgggaaatgagcagaatggagcctttatattctttcagggcgcgcttgagctcttccttggcatcgacatccaagtggtttgtcggctcatcgagcaccagcaggtttgtttctgagttgattagcttgcacaatctgactttcgctttttcgcctccacttaatacggcgacgcggctttcgatatgctttgtcgtcagtccgcattttgccaaagcggcacggatttcatactgcgtataagaagggaattcgctccatacttcttcgatgcacgtattgttgtttgtttccttgacctcttgctcgaaatagccggtatagatgtgctcaccgcgttctacagagccttcgagcggctggatttcaccaagcaaacttttcaacaacgtcgtttttccgatcccgtttgcgccgtaaagggcgattttttggccgcgctccatgcggaggttgagcggacgggacagcggggaatcgtaaccgatcacgagatcctttgtttcaaaaatcagcttgcctgacgttctcgccggcttaaagtggaattccggctttggcttttctgccgcaagctcgatcatatccatcttatcgagtttcttttggcgggacatcgccatgtttctcgtgctgacgcgcgctttgttgcgggcgacgaaatccttcagctctgcgacttcctgctgctgctttttataggccgcttcaagctgctgtttcttcacctcgtagacttccataaactgatggtagtcgccgacatagcgtgtcagctcttgattttcaacgtgataaatcaggttgatgacactattcaagaacggaatatcgtgggaaatcaggatgaacgcgttctcgtattcctgcaggtagcgtttcagccattcaatatgctgttcatcaagatagttggtcggctcatcgagaagcagaatttccggcttttcaaggagcagcttagcgagaaggacctttgtgcgctgtccgccgctcaaatcggtgacatctcgctctaatccgatatcgctcaaaccgagaccgcgggcaatttcctccaccttggaatcaatgacataaaaatcattgtttgtcagcgcgtcttgaatgacgccgacttcttcaagcagcttttcgagctcgtcgggatctgcttcacccattttgttgtaaatctcgttcatttcctcttccatcgcaaatagataatggaacgcgtctttcaggacgtcgcgaatagattttcctttttccagcacggtatgctgatccagatagccgacacggacattttttgaccattcgacttttccctcatcaggttcaagctttccggtaataatattcatgaaggttgattttccttcaccgtttgcgccgatcaagccgacgtgctcgccttttaacaggcggaaggaaacgttattaaaaatggcccggtccccgaagccgtggcttaaatcctttacagataaaatactcatgtttacacctctatcgttatcaaacacgcacaatcggcgtgtaatattcacccttttgattataaaggaggattcggaatgttgaaaggtataggaaagaaaaagaaaaattgcgttccgggcgaggttttgagatactatggaatagatttcaggaattgaggagaacaaaatgacgcaaacttggccatttttacataatgcacaatcatttatacaagagaattggagtgcttccggctttcaaacgccaacccctgttcaagagcaggcagcccagctaatcatggacggaaaggatgtcatcgcggaatcgccgacaggcacaggcaagacgctggcgtatgcgctgccggtcttggagcggatcaaaccagagcaaaagcatccgcaggcggtgattttagcgccttcccgtgagctggtgatgcagatttttcaggtgattcaggattggaaagcgggctcagagctgcgcgcggcttccttaatcggcggggcgaatgtgaagaagcaggtcgaaaagctgaagaaacatccgcatatcatcgtcggcacgccaggcagggtatttgaactgattaaagcaaagaaactcaaaatgcatgaagtgaaaacgattgtacttgatgaagcggatcagcttatcctgccggagcatcgcgagacgatcaaacaaattattaaaacgacattaagagaccgccagcttctatgtttttccgcgacactcaaaaaggaaacagaggatgtgctccgcgaattggcgcaagagcctgaggtgttgaaggtacagcgaagcaaggtggaggcagggaaagtgaaacatcaatacctgatttgcgaccagcgcgacaaagtgaagctgctgcaaaagctgtcaaggcttgaaggcatgcaggcactcgtatttgtgagagacattggcaacctgagtgtatatgcggaaaaactggcatatcaccacgttgaactcggcgttttgcacagtgaagcgaaaaaaatggagagggcaaaaatcattgccgcattcgaagacggagagtttcctcttttattggcgactgacattgccgcacgcggtttagacattgaaaacctgccatacgtgattcatgctgatattcctgatgaagatggctatgtccacagatcaggacgaacaggccgggccggaaaagaaggcaacgtgctgagccttgtgacaaaattggaggaatctaagctgaaaaaaatggcgaagaagcttggtgttgaactgagtgaagctgtgtatgcaggcggaaaactgaagacgaaataaaaagaagggcgaaaagcccttttttttgttgtaaaataatagaaaaagtttcgcgcagggggtgggaaggtggtttcaatagacaggtttcaagcagtgaaggagtcagagctgaaaattcttgaacgctggtttgagaatgaggataccagacggagaatggatgggatgctgccattagatgagtggtatgcacgagtaaataaagataaacacgatactgtcatcatggcgtatgatggacagctgccggcagggatggtcgttattgagttcggggagaagcggacatatattggattgatcgtcaatcctttgtaccggcttcaagggtacggaaaacggatattgcaaaagctgatgaccgaacctgattttactagcgtgcgggaatgggtggcatgcattgaagaagacaatcgaatcagtttagcttgctttcaagcagcaggattcactttggaagatacagaacctgatgaagatggttttcttacgctgattcttcgcagctgatctcatcgaaacacaaaaggagggcaaaaagccctcccgttttcatcttcattcagctcggatcactgaccttgatcagctgtttccctttattttctcccttaaataaaccgagaaacgcgtcaggaatgttttcgaagccttctgtgatggtttcctcgtaatggagtttaccagccttcagccattcggccagctgttttgctccctcagaaaaacgatcggagtagtcgctaacgataaacccttgcatcagcgactttgttttaatgagttttgattggacacgagggcccatgtcatctgcttcgctttctgcgttataggaagaaatggcgccgcacaccggaatgcgggcaaattcattgagcagattcatcaccgcgtctgaaatcggtccgccgacattgtcaaaatacacatcgacaccgtcaggacaagcgttttgaagcgctttttggatatcatccgctgttttgtaattgatggcttcgtcaaactgaagctcctgttttaaatagtcgattttttcatcagaacccgcgataccgacaactcgcgcgcctttgattttggcaatttgcccgactgttgaaccgacggctccggcagctccggagacaaccacggtttcgccttccttcgggcgtccgatgtccagcaatccgaagtatgctgttaagccggtcattcccaaaatgccgagataggccgaagcgggagcaaggcttgtatcaatttttcgcaaggcagactcgctcacagcggaaaattcctgccagctgagatttccgatgacgatatcgccttttttcagatgattcccgtctgacacaacttcagcgatgaccccgccagagagtgcttcatccaaggcgaacggttcaacatatgactttgtatcctgcatacgtccgcgcatataagggtcaaccgaaacataaagcgttttgacaagcacttccccttgctggggttcaggaaccggaatggtttcaaagcgaaagtctttatgaacaggaataccttgtggacgtcttgctaattgaatttgctgctgagatgctgtcattttcatcctcctatcacttggttgacaccactgtaacatggacaggagaggaaatacaaaaggtaagctggcatacaaaaaaggagaggggctcctctccttttcatttcgcccgtaatttcgggcacagtcccgtcggcagacacattggcttctggtcgatcgggcttctcatgatgcagcattccaagccgaagacttcacggaaaaatggctgggtgaacacatcttccggtgttccggcgttgtatatttttccgtccagcacactgattagatagtcagcatattgcgcagcttggtttaaatcatggagcaccatgacaacggtgcggccatggtcgcggttcagctttttcagcagttcaagcacttcaatctggtgtgagatgtctaaatacgtggtcggctcatcaagcaaaagcaaatcagtgccttgcgcaagtgccattgaaatccaggctctttgtctttggccgcctgagagggcatccagcgtccgatccttcagttcaatcatgcccgttgcttccagcgcccactctaccatgtcatgatcctcttgggtatgcttggataacagctttttgtgaggatgtctgccaaaatagcataattcctctaccgtcaatccttcaggggcctgaggagattgtggaagaatggccagtttttttgcgacttcttttgatggctggcggtggatgtcttttccttctagtagcactgtaccgcttttcggggccatcagcctggcgagcgatttgaggattgttgatttaccgcagccattagcgccgatgagcgcagtgatttttccttcttctatctttaagtcgactccgtcaataatcactgtactgtcatatgaaagagtgagctggtctgcagccagttttcccatggtatcctctccctactgtttcctcgcttcgaatttcaataaatataagaaataaggcgcgccgatcacggctgtcagtattccggcaggtatttcaaccggaggcatgatgccgcgccctaacgtatctgcaattaataatataatagcaccaatcaatgcggatgcaggcagtaaatatttagctttttctccggtaagccgtctggcgatatgcggagcaagcaagccgataaaaccgattgagccgacgacggctacacagcttcccgccagcgccaccgcggtgaaaatcaggatgaatctcagccggtttgcgttttctccgagaccctgtgcaagctcatccccgagtgacataagatccagcttcggtatgagtatgcagacgatcggaaaaagaatcaaaagccatggcgcaagcagcttgacttcttcccagtttcttccccagaggcttcctgtcagccaaatgagtgcagcattcacgtcgcctggaaactttaccatcatatattgcattccggcgtggcagaccgcgcctaaagcaatgcctgataaagccagtgaagagggctgaatgctcttttttcgggctatcattaataatagtacagcaataatggcggctccggcaaatgcggagaacggaagcacgtataccggcgactcaggaaagatgagaatcacagccatcgccgcaagtccggagccttttgaaatgccgacaacgtccggggaagcgagcggatttcggatcacaccctgtaaaatcgctccggcagcggcaagcccagcaccggccaaaatcgctaatataatgcggggaaggcgatattgctggatgataaattcaaaggaatgatccagtcccagcagattcgtcactaccgcatcaggtgaaatgtataatgcaccgattccaatgctgatgacggacagaacgattaaaatcacggccaatatgagtatcgccagtaaggggcgtttttgttttctggttgttttcttcatttcagatgtcgccctttccttgccaaatataagaaaaacggcgttccgataatcgcggtgacaatgccgaccggtgattcataaggaaatgcaatccatctggccagaacatctgcgtacaccagcaaaatggcaccgaacagtgccgaaaacggaagcacgtattgataatgttctccgatcagcttgcgaacaatatgcgggacgagcagcccgacaaagccaatcggcccggcgacggctacggaagcgccggaaaggattaaaataatcaaactgatcagaatccggatgccgttcatattttgtccaagcccttttgctgtttcgtctccgagaccgagaacagaaacagaaccggaaaatacgagggcaagcccgatgccaatgacagaaaacggagcgatggttatgacatcctgccagttgctgccgtcgattgcgcctgtcatccagtacagaacatcctcacctgactcatttaaaataatgatggcctgtgtcatagaggagaggaacaaatgcacggccattcctgacagcgccagcttaacaggtgtcattccgccggatgaggcaatcatatacacaatcgcgccgcctgctgccgcacccgcaaaagcgaatataacagatgaatagggcgatgccggcagaatgacgagagaagcaacgacaaaaagcgatgcacccgcattcacaccgaaaatttggggtgaagccagaggatttctggtcatagcctgcatcagcgcccctgctacagctaggctggcgccgacaaaaacgccgattaaagtgcggggaaggcgaagagtagagatgatgagctgttcctttgaaccgtcccatacaaaaagatatttcaatgaatctatgatgccgatgtctgaggctcctactgaaagattcagcccaagcccaaatataaaaataatcagtgcaatgatgaacatcatcagtcttgatgatgagcgccgtttggctgaatgatacaacagtctcacttccttactgcgtctggttgcaaaaacgaagaagcaaggatttcccctcgcttctcatttgtcctatttattatacacttttttaagcacatctttggcgcttgtttcactagacttgatgcctctgaatcttgtccaagtgtcacggtccgcatcatagacttgtccatttttcaccgctttgagatttttccagagcgggttcgttttccactcgtctacaatggttttgccttcgttggctgagatgaacaaaatatcaggatcgattttgctcaattgctcgaggctgacctcttgataggcgttatctgacttcacggcgtgtgtaaagccgagcattttaaagatttctccgtcataggatgatgatgtatgaagctggaaggaatccgctcttgcaacgccgagaacgatgttgcggttttcatctttcggaagttcggcttttagatcgttgatgacttttttgtgctcggcaagcttttcttttccttcatcttctttatttaatgctttagcaatggtcgtaaagctgtcaatcgtttcgtcatatgtcgcttcacggctttttaattcaatcgtcggagcgatttgtttcagctgtttataaatgtttttatggcgctcagcgtcagcgatgattaaatcaggcttcaaggaactgataacctcaagattgggttcgctgcgtgtgcctacagatgtgtaatcaatggagctgccgacaagctttttaatcatatcttttttgttgtcatcggctatgcccaccggcgtaatgccgagattgcgaacggcatccaagaatgaaagctcaagcacaaccacccgcttaggtgtgccgcttactgtcgtttttccttcttcgtcatggatcactctggaatccttagactcacttttgccgcttccgttgttattctggcttgatgaacagccagatacaatgaggcaggcgagcaataaaacactcatgatggcaatcaacttgttagaataggtgcgcatgtcattcttccttttttcagatttagtaatgagaatcattatcacatgtaacactataatagcatggcttatcatgtcaatatttttttagtaaagaaagctgcgtttttactgctttctcatgaaagcatcatcagacacaaataagtggtatgcagcgttaccgtgtcttcgagacaaaaacgcatgggcgttggctttagaggtttcaaacatatcagcagtgacataaggaaggagagtgctgagataaccggacaatttcttttctatttcatctgttagtgcaaattcaatgtcgccgatattcatgataatcgagaaaacaaagtcgatatcgatatgaaaatgttcctcggcaaaaaccgcaagctcgtgaattcctggtgaacatccggcacgcttatggaaaatctgtttgactaaatcactcacaatccaagcattgtattgctgttctggtgaaaagtattgcattagacatacctcctgctcgtacggataaaggcagcgtttcatggtcgtgtgctccgtgcagcggcttctctttaattttgatttttctgaaaataggtcccgttcctatcactttaccatggacggaaaacaaatagctactaccattcctcctgtttttctctttaatgttctggaatctgtttcaggtacagacgatcgggtatgaaagaaatatagaaaacatgaaggaggaatatcgacatgaaaccagttgtaaaagagtatacaaatgacgaacagctcatgaaggatgtagaggaattacagaaaatgggtgttgtgaaagaggatgtatacgtcttagctcacgacgatgacagaacggaacgcctggcagacaacacgaatgccaatacgatcggagccaaagaaacaggtttcaagcacgcggtgggaaatatcttcaataaaaaaggagatgaactccgcaataaaattcacgaaatcggtttttctgaagatgaagccgctcaatttgaaaaacgcttagatgaaggaaaagtacttctctttgtgacagataacgaaaaagtgaaagcttgggcataaagcaaggaaaaaaccaaaaggctatgacggccttttggtttttttgcggtctttgcggtggcattttgcagaatgccgcaataggatagcggaacattttcggttctgaatgtccctcaatttgctattatatttttgtgataaattggaataaaatctcacaaaatagaaaatgggggtacatagtggatgaaaaaagtgatgttagctacggctttgtttttaggattgactccagctggcgcgaacgcagctgatttaggccaccagacgttgggatccaatgatggctggggcgcgtactcgaccggcacgacaggcgggtcaaaagcatcgtcctcaaatgtgtataccgtcagcaacagaaaccagcttgtctcggcattagggaaggaaacgaacacaacgccaaaaatcatttatatcaagggaacgattgacatgaacgtagatgacaatctgaagccgcttggtctaaatgactataaagatccggagtatgatttggacaaatatttgaaagcctatgatcctagctcatggggcaaaaaagagccgtcgggaacacaagaagaagcgagagcacgctctcagaaaaaccaaaaagcacgggtcatggtggatatccctgcaaacacgacgatcgtcggttcagggactaacgctaaagtcgtgggaggaaacttccaaatcaagagtgataacgtcattattcgcaacattgaattccaggatgcctatgattattttccgcaatgggatccgactgacggaagctcaggaaactggaactcacaatacgacaacatcacgataaacggcggcacacacatctggattgatcactgtacatttaacgacggttcgcgtccggacagcacatcaccgaaatattatggaagaaaatatcagcaccatgacggccaaacggatgcgtccaacggcgctaactatatcacgatgtcctacaacttttatcacgatcatgataaaagctctattttcggatcaagtgacagcaaaacctccgatgacggcaaattaaaaattacgctccatcataaccgctataaaaatattgtccagcgcgcgccgagagtccgtttcgggcaagtgcacgtatacaacaactattatgaaggaagcacaagctcttcaagttatcctttcagctatgcatggggaatcggaaagtcatctaaaatctatgcccaaaacaatgtcattgacgtaccgggactgtcagctgctaaaacgatcagcgtattcagcgggggaacggctttatatgactccggcacgttgctgaacggcacacagattaacgcatcggctgcaaacgggctgagctcttctgtcggctggacgccgtctctgcatggatcgattgatgcttctgctaatgtgaaatcagatgtcataaatcaagcgggtgcgggtaaattaaattaagaaagtgaaaaacacaaagggtgctaacctttgtgttttttaattaattaaaatgtttattaacttagttaaggagtagaatggaaaaggggatcggaaaacaagtatataggaggagacctatttatggcttcagaaaaagacgcaggaaaacagtcagcagtaaagcttgttccattgcttattactgtcgctgtgggactaatcatctggtttattcccgctccgtccggacttgaacctaaagcttggcatttgtttgcgatttttgtcgcaacaattatcggctttatctccaagcccttgccaatgggtgcaattgcaatttttgcattggcggttactgcactaactggaacactatcaattgaggatacattaagcggattcgggaataagaccatttggcttatcgttatcgcattctttatttcccggggatttatcaaaaccgggctcggtgctagaatttcgtatgtattcgttcagaaattcgggaaaaaaacccttggactttcttattcactgctattcagtgatttaatactttcacctgctattccaagtaatacggcgcgtgcaggaggcattatatttcctattatcagatcattatccgaaacattcggatcaagcccggcaaatggaacagagagaaaaatcggtgcattcttattaaaaaccggttttcaggggaatctgatcacatctgctatgttcctgacagcgatggcggcgaacccgctgattgccaagctggcccatgatgtcgcaggggtggacttaacatggacaagctgggcaattgccgcgattgtaccgggacttgtaagcttaatcatcacgccgcttgtgatttacaagctgtatccgccggaaatcaaagaaacaccggatgcggcgaaaatcgcaacagaaaaactgaaagaaatgggaccgttcaaaaaatcagagctttccatggttatcgtgtttcttttggtgcttgtgctgtggatttttggcggcagcttcaacatcgacgcaaccacaaccgcattgatcggtttgtccgttctcttattatcacaagttctgacttgggatgatatcaagaaagaacagggcgcttgggatacgctcacttggtttgcggcgcttgtcatgctcgccaacttcttgaatgaattaggcatggtgtcttggttcagtaatgccatgaaatcatccgtatcagggttctcttggattgtggcattcatcattttaattgttgtgtattattactctcactatttctttgcaagtgctacagcccacatcagtgcgatgtattcagcatttttggctgtcgtcgtggcagcgggcgcaccgccgcttttagcagcgctgagcctcgcgttcatcagcaacctgttcgggtcaacgactcactacggttctggagcggctccggtcttcttcggagcaggctacatcccacaaggcaaatggtggtccatcggatttattctgtcgattgttcatatcatcgtatggcttgtgatcggcggattatggtggaaagtactaggaatatggtagaaagaaaaaggcagacgcggtctgccttttttttattttcactccttcgcaagaaaacggattttgaaaaatgagaaaattgcctgtgaaaaatggtatgatctaggtagaaaggacggctggtgctgtggtgaaaaagcggttccatttttccctgcaaacaaaaataatggggctgattgcggctctgctggtctttgtcattggtgtgctgaccattacgttagccgttcagcatacacagggagaacggagacaggcagagcagctggcggttcaaacggcgagaaccatttcctatatgccgccggttaaagagctcattgagagaaaaggcggacatgcggctgagacgcaagaggtcattgaacaaatgaaagaacagactggcgcgtttgccatttatgttttggacgaaaaaggagacattcgcagcgcctctggaaaaagcggattaaagaaactggagcgcagcagagaaattttgtttggtggttcgcatgtttctgaaacaaaagcggatggacgaagagtgatcagaggaagcgcgccgatcataaaagaacagaagggatacagccaagtgatcggcagcgtgtctgttgattttctacaaacggagacagagcaaagcatcaaaaagcatttgagaaatttgagtgtgattgctgtgcttgtactgctgctcggatttattggcgccgccgtgctggcgaaaagcatcagaaaggatacgcttgggcttgagccgcatgagatcgcggctctatatcgtgagagaaacgcaatgcttttcgcgattcgagaagggattattgccaccaatcgtgaaggcgtcgtcaccatgatgaacgtatcggcggccgagatgctgaagctgcccgagcctgtgatccatcttcctatagatgacgtcatgccgggagcagggctgatgtctgtgcttgaacaaggagaaatgctgccgaaccaggaggtaagcgtcaacgatcaagtgtttattatcaatacgaaagtgatgaatcaaggcgggcaggtgtatgggattgtcgtcagcttcagggagaaaacagagctgaagaagctgatcgacacattgacagaggttcgcaaatattcagaggatctcagggcgcagactcatgaattttcaaataagctttatgcgattttagggctgcttgagcttggggagtatgatgaagccattgatctgattaaagaggaatatgcgatgcaaaatgaacagcatgatcttttattccataacatccattcgcagcaggtgcaggccattttgttagggaaaataagcaaggcatcggaaaagaaggtcaagctggtgattgatgagaacagctcactcgcgcctcttcctgcgcatatcggcttgtcccatcttattacgattattggcaatttaattgataacgctttcgaagctgtagcggagcaaagcgtgaaggaagttttgttttttatcacggatatgggccatgacattgtcattgaagtatcagacacagggcccggtgtgccgccagagaaaatagaagctgtgtttgagagaggctattcttcaaaggggatgaggagaggctacggtctggccaatgtgaaagactcagtgcgtgaactgggcggctggatcgaactggcgaatcaaaaaactggcggggcggtattcactgtgtttataccgaaggagaaacaaagggggaatccatttgattcacatcgcgattgcggaggatgattttcgagttgcgcaaatccatgagagattgattaaacagcttgatggattcaagattatcggcaaggcggctaacgcaaaagagacattggcgcttttgaaggaacacaaggttgatttgcttctgctggatatttatatgccggacgagcttgggaccgcgttgattcctgatatacgaagccgatttcctgaagtggacattatgattatcacagcggcaacagaaacccggcatttgcaggaagcgctaagagcaggaattgcccactatttgatcaaacccgtaacggctgacaagttcaggcaggtgctgcttcagtataaagaaaaaaggaagctgctcatgtctcagccggaggtcagccaatccatgatcgaccatatttttgggaacagtgtgaagacagctttgccggcagaggatttgccgactggcattaattcgattacactgcgaaaaattaaggaagcgcttcagactgcgtcagaaggattgacagcggaggaacttggggaaaaaatgggggcgtcacgaacaactgcccgccgttatgccgagtatcttgtgtcaaaggaagaagcaagagccgagcttgaatacgggattatcggcaggccggagagaaaatattatttggcggcggattagatatgaaaaaatctataatcctattgattttactattgatctttatgcagggtgatatcaggcaggcggctgcgccgcgcctgccggacgggccgatagaaattgttgtccctgccgaaccttctggcggctgggatgtcacagcgcaggcgatccaatcagttttgaggcagaagcagatcgtgaagggagatgttcatatcgtctataaatccggcggcgggggagagaaaggctggaaatatgtcaacaaaagcagcaaacaaaccatcagcatgacgtccagcctaatattgagcaatgatcttctcgggcaaagtaaattaaaaatgtccgattttacgccgctcgccattctctccaaggaatggcagacggttgcattgccaaaaggatcagcgttaacaaatggcaaggatgtgctgaatgagatcaacatgcatcccggcaaggtgagaatcggctttgccccggggtttggcaatgatgatcagctctcgttcgtcagagcggcagatatgtacggcattgacccgtttgacattcaattctcacagtatgacagcagcgaacagctcattcaggcgctgatcagacatgagatagaagcggcttccatgacactttctgaagcgaaaccatatgaacgaaacggcgatatcacgttagccgctgtaacgtctgataaaagacttcccggttttccaaatgtaccgacgtggaaggagcagggaatcccgtttgttttttctcattggagagggattttgggcccgaaaaatatgtctgaggaagagatttcttactgggatcaagcgctaaagaaggtcacctcctcacctgaatggaagcggaaaataaacgaacaggactgggaaagcttttatttgaacagcagggaaacgaaacggtttttagaagagcaatctgctttttatcaaagcatcatgacaggaaattaagatcccggcatcccgggatttttttcatgccgaaaattgatcaaaaagaacaaaacggttttaaaaaattaaaaatacaaaaaaaccaaattatttacttgcggttggttttcccatacgatggcaaaaaggcaagacaaaaaggggagtaagggagaaaaaaatgtaagcggattcatttaagggggaatggatgtgttagcaatcttaggctttctcatgatgcttgtgtttatggcattgatcatgacaaaacggctttctgttttaacagcattagttttgacgccgattgtgtttgcgcttatcgccggatttggatttactgaagttggggacatgatgatttcggggattcagcaagtcgcgccgactgcggtcatgattatgtttgcgatcttatattttggaattatgattgatacaggcctgtttgatccaatggttggcaaaattttaagcatggtcaaaggagaccctttaaaaattgttgtcgggacagcggttcttacaatgctcgtcgccttggacggagatggctcgacaacgtacatgattacgacaagcgccatgcttccgctctatttgctgctaggcatccggccaattatcctggcgggaatcgcgggagtcggcatgggaatcatgaacacaattccatggggcggtgcgacgccgagggcggcgagtgcgctgggggttgatccagctgagcttacagggccgatgattcctgtcattgcaagcgggatgctttgtatggtggcggttgcgtatgtgcttggaaaagcggaacgaaagcgccttggtgtgattgaactgaaacagccagccaatgccaatgaaccggcggcagcggttgaagatgagtggaagcggccgaagctttggtggttcaatttattgttaacgctttctttaataggatgtttagtatcgggtaaagttagtttaaccgtactgtttgtcattgcgttttgtattgcgctgattgtgaattatcccaatctcgagcatcagagacagcgcatcgcggcgcattccagcaacgtgctggctatcggttcaatgatttttgccgcgggggtgttcacggggattttgacaggcacgaaaatggttgatgaaatggcgatctcgctcgtgtccatgataccggaacaaatgggcggattgatcccagcgattgttgccttaacaagcggtattttcacatttttgatgccgaatgacgcgtatttctacggggtgctgccgattttatcagaaacagctgtcgcatacggtgtggataaagtggaaattgccagagcctctattatcggccagccgattcatatgctgagtccgcttgtgccatccactcatttgcttgtcggactcgtcggagtttctattgatgaccatcaaaaattcgcattgaaatgggcggttctcgcagtgatcgtcatgacggctatcgctctattgatcggtgcgatctctatttccgtatgataattcaggcgtaatgacacacactaacggcatataacattccggaggtgtcattatgagtgatccttatatgccgctgacttcagtcagaagcggaacggggttcgaagcggcaaaaggggtgcacggcctgactgtgcaaattgcgaatgtctattttattcagctgccttctgaacctcactcatttgttttaattgatgccggcatgcctcaatcagccggcatgattgtcaatgaagccaaacaaagattcggtgaagggtttcagctgaaggcgattatcctcacacacgggcactttgaccatattggggcaatcgaagagatccttgagcattgggatgtgcctgtttatgtccattctcgggaaatgccctatgtaacaggtaaagaagattatcctccggctcgtcctgacagcaagagcgggctggtcgccaagctgtcgccgctgtttccgcggcactccatcgatatttcctcacatgtccaggcactgccggaagacggttcagtcccttttcttgacgagtggatgtggattgcgacaccaggacacacgccgggccatatttcgttattccgcgatgacggccgcgtgcttgtggcaggtgatgctgttattacagtggaacaggagaaaatggctgacgtcttgatacaaaaacaggagcttcacggtccgccggcttatttcacgcctgacacagagacggccgctgagtccattctgaagctggccggtcttgaaccggaagcgttattgacagggcacggcataccgatgaccggcaaaaactttcgaagtgacttaactgaattggcaaatcggttatcgtctatttgacacccgcaccacgcgggtgttttttattgttttccaggaagttgcagaaaaatcatttgtcttgccgcttaaaaacgatacaatgaaaagcatgaagtgatgtgaaggggagagtttgttggaagaaaaagaaatactctggaacgaagcgaaagcgtttattgccgcatgctatcaggaattgggaaaggaggaggaagtgaaagaccgtctcgaggacattaaaagtgaaattgacctgaccgggagctatgtacatacgaaggaagagctagagcacggagcgaaaatggcttggagaaacagcaaccgctgcatcggcagattgttctggaattcgctgaatgttattgacagacgagacgtccggacgaaggaggaagtgcgtgacgccctctttcaccatattgaaaccgccaccaataacgggaaaatcagaccgaccattacgattttccctccggaagagaagggtgaaaagcaagtcgagatctggaatcatcagctgatccggtacgctggatatgagtcagacggagaaagaatcggagacccggcttcctgttccctgacagcagcctgcgaagagctcggctggcgcggagaacgaacggattttgacctgctgccgctcatttttcgcatgaaaggagacgaacagcctgtctggtatgagctgccgcgttcacttgtgatcgaggttccaatcatacatccggacatcgaggcgttttctgatttggagctgaagtggtacggcgtgcctatcatctctgatatgaagcttgaggtcgggggcattcattataatgccgcgccatttaacggctggtatatgggcacggagatcggagcgagaaacctcgcagatgaaaagcggtacgacaagctgaaaaaagtagcgtccgtgatcggcatcgccgctgattacaatacggatttatggaaggatcaagcgctagttgaattgaataaagcagtgctgcactcgtataaaaagcagggtgtcagcatcgttgaccatcatacagcggcaagccagtttaaacggtttgaagaacaggaggaagaagcgggcagaaagctgacgggggactggacgtggctgattccgccaatttcacccgctgccactcatatcttccaccgatcctatgataactcaatcgttaagccgaattacttttatcaagataagccttatgagtaaacaatagaaaatcgatgatggccttcaaggctgcgggattcagtcacagagatgtcggtaacctttgagaaagggcttccgttctttacagcctcaacaaacgattgcagggcgttttccggaccctctgccaaaatctcgacacgcccgtcatcacggtttttgacccagccggccagttttcgcttatcagcttccatttgaacaaaatagcgaaagcccacaccttgaacccggccgtttacaatgattcggtattgaagcatgtaaaaaccaccttttctttttatgataatcaatcattttacaacctgtaaaggggatgtgtttgtatgaaaccagagcgctattcagttctttctcttaatctgggaaaaccgcagacgcttgaatatgacggaaagaaaatcgaaaccggcatcatgaagcggccggctgaatcagccgtcatgctgtatcgggagaattttgaaggagacggacaggcggacctcgtcaaccacggcggacctgataaggctgtctgtgtctacccggcggagcattatccgttttgggaagagttcctctcaagaccgctgtcaaatgccgcatttggagaaaatctgacggtcgcgggcctgactgaggagaatgtttgcatcggggatgtgttcaagcttgatgaagctgttgttcaggtcagccaaccgcgccagccgtgtgtaaagctggcgaaaaagtttggtgtaaaagaaatggtgctgaaggtccagcaaaccggctatacagggttttattttcgcgtgctggaggagggcagggtgtctcccggcgcgaaccttgaattgctgtccagaggagagaagggcatctccgtccagttcgccaaccgcatcaactaccatgatgcaaaaaatctcaccgccattgaacggattttaagtgaggctgcactatcggaaagctggagagcgtcctttatgaaaaagaaggacaggctgctgccggttgaatagaaaaaagccgcgcatatcaacgtgcgcggctttgccatatttaagattgttttttctttgtttcaagcaggttggcaagaaaataggttttatagctttgaagctttcttccctcatggtgcgtgatcccctgcttttttagttctgccacataccagcctttactgccgtaatgcatgtcagaaaactcctttccctatctgatttcgaaacgattggcattgtaacatctataaaaagatgctgaaaagagatgcggggaaaactgagcctttcgcactagatgtacgaatgttcttctgtatgtatatgcggagcaaaagccgaatatgatttaatggccggttagtttgatcatgacaacgccaaatgtcataatggcgaaaacaatgccgatatatgtgagcatcccgttttttttcttaacgccgtaaacggtcataatgatgccttcaatgaaaaaaatgatgccgaaaataataaaccacatgcagataaaggctcctttcacagacataatagtagtgtagcatatctgaaagagccgggctgtgacaatatcaagaaagccgggcgcatatcgcccggctcatgttttattgtttatcaaccaatttgaccagaagctgtgccaaatgttctttctcatcttcgtccgcaacgctccaaagctcttgcagcagcatttcttcaccgttttgcggctcttcatgctttgcgaggtagtctcccagaatcgcagcgcttttcacaagcttgccgtcatccaatcccagctttttgcctcggttgacttgttttttcaggtagcctttaaattcctcaaagtcttttaaaatgtcttcttttattgtgccatgcatcgcgtttatttcgttttcaatttggattttttcttgatctctgtgcattgcaagacctcctcgtgcagaataatgatgctttacctgctattggaggaggttaaacctgccggaagcccggaatgtgttttacagtttcgtcaggataatcggttcatcttttgtgatgacgatcgtgtgttcaacttgggcaaccatgcttttatccggcgtcttgaacgtccagccgtctccagcttcaacaatcgtttctgctttcgttgaaataaacggttcaagcgcgatgactgtgccatttttgaacagtgcgttatcaaacggatcataatagttcatgatgtgattcggcgcttcatgcaggcttcggccgattccgtggccggtcagggttttgatgacggtaaagccttgagagcgtgcttcatgataaacggctcttccgatctggttttggcgcttgcccgcttttgcctgctgaagccccttttgaaaagcgttttccgcgcattggcaaagcttatgaaggcgttcttctccttcaccgagcacaaatgagatgcctgtgtcggaatagaagccgccaaattcagcggagatgtcgatgttgacaaggtcccctgcttttaaaattttggatgtgcttggtatgccgtgagccacttcatcatttacgctgatgcatgtcacgcctggaaaatcgtattccttctcaggagctgaaacggcgccgtgctcatcaagcacagcttttccgataaggtcaaggtcttttgtgctcatgccgggctctgccttccgcttcatttcttcacgcgcaagcgcgacgattcttccgatttttttcaggccttctaattcttgatcgtttgttacaatcatctgtcattcccgctttctttttaaataatctagattaagcttaccacaactgtcttaaaaataggaaacacacgggcctgggaaaaaagaaatacccccgggaaaattggtatagatcactagatatcttatatggtatatttgaaaaaaaagggtatgagggggatgggtatgctttcatttttacaaaaactcgggaagtcatttatgctcccgattgcagttctgcctgcggttggaattatccttgcgcttggcagagaggatgtatttaatatcccgtttgtctatcaggcggggacggcggtttttgatcatctgccgcttatttttgcgatcggaattgccatcggcatttcaaaagacagcaatggggccgcgggtttatcaggggcgatatcgtatctgatgcttgacgcggctacaaagacaattgataaaacaaataacatggcggtgtttgggggaattattgccggtttaattgccggttacacctataaccgcttcaaggataccgagctgcctgaatatctcggatttttcagtggcagacggcttgtgccgattataacagccattattacgatcattttagcgggcatattcggagtcgtctggccgccgattcaatcttgtatcaactcgtttggagagtggatgctcgggctcggcggcatcggggcaggcatattcggccttttcaacaggctgttaattccgcttggccttcaccatgtactgaacaatattttctggttccaatttggagaatataacggagtgacaggggatctggcgcgctttttcgcgaaagatccgacagcgggcacatatatgacgggattcttcccaatcatgatgttcggtcttccggcggcgtgtctggctatggttgtgactgcgaagccgtctaaacggaaagcgacggctgggatgatgattgggtttgctttaacggcgtttatcacagggattacggagccgattgagtttgcatttatgtttttatctccgcttttatacgctgttcacgcggtcttaaccgggttatctttatttatcgtcaactggctcggcatccgctcaggcttctctttttcagccggagctatcgattatgtgctcagctatggaatcgcggaaaaaccgctgcttctgcttttggtaggtatatgctatgcggcagtatactttatcgtgttttatgtactgattaaggctttgaatttaaaaacgcctggacgggaagacgatgatgtggatgaagtgctggatgaaaatactgttcaggatgtaaatgaaaacatcatgctgaaagggctcggcggaaaagaaaaccttcaaaccattgatcattgcgccacaaggctgcgactgactgtgaaggataccgctttggtggatgaagcgctgctaaagaaagcaggcgcaaaaggggttgtcaaatcgggcgggcaatcggttcaagtcattattggcccgaatgtggaatttgcagctgaggaattgagggctgctgtcaaataaaaaagcggagaggttgccctctccgctttttcttatttatcttcgttatcctttgacgtttcggaagaatcttcgtcatgttttgtgtaatcataatcagaaggatttaccttcttaaaacctttcggctcgtagaaccgcagcaggtctccgtttatgattttatcggacatttcaagttccttcttgacgagcgagtcttctgacttgtcgacttcggattcatcgagttcttttccggttttcgtgtcgtaatacttaccggatattttcgtgtacttcggtgaaataaagtctccgtttcggaacggaatcacttcacggtgttctttcgataaaatatcagaaccggacatcagatagtccttcgtatccactccgagcagatgcagaatggtaggagccacatcaacgtctccggcatatttatgaactttctcgcccttcacgccggcagcgtggataaagagcggcacccgttgaagctgggcgttgtcgtaatcagtgatttcatccttgccaagtactttcgccatcgctttattgtggttttcagagatgccgtagtggtctccgtacatcacaataatcgatttatcatataacccgtcttttttcagatcattgaagaattgttcaatagactgatcaaggtaatgggctgactggaagtagttatcgacgacagagtcaccaaagtctccagccgggaagtctgtatccccctcatccattccgaatgggaagtggttagacagggtaatgaacttcgtatagaacggctgcggcaggctttccagcagcggcattgattctttgaagaacggtttgtctttcatgccgtagtttttcgtgttttcttcgttcatgtcatagtaagcagaatcaaagaatttatcaatgccttccgctttgtacatttcgttacggttccagaacgtctgcgtgttcccgtggaaagtagcagatgtgtaattcttagacttcagaatcgccggaacggattgcagcgtgttttgcgctttgtttacgaaaactgaaccttgagccagcgggtacagagagttttccatcataaattcagcatcagatgttttaccttgtcccgtttggtggaaaaagttatcaaagtagaacgtttcgttatcatgtgccagtttatttaagaacggtgtcacttctttgccgtcaattttatagtcgatgataaatgactgcaaagattcaagtgaaacgtaaatgacgttttttccttccgctttgccgaaatacacgttattcggcacatcgtaattggctttcatgtagttttccacttccgttacgtcgctggaatcggcaagcgcgcgctggctgttggacttgatattctgtacagcgtcataaatcgtgaaattgtatgttcccaagtatttcacaagatagttccggtcgaatgatcttgtcagcaattcaggacggtctgattccgcaactgccaggttgatcaagaacacaagaattgaagacgcaaaaataattcggaacgattttttgcttgacgtttcggcaggcttgtttactttgatcgccaagatgatcaggatgatcgtatcgataaagtaaaaggcgtcagtcggtctcatcagcgaaaatgcgctgtcaccgagttggccgccgtttgttttagcctgcataatgaccggaattgtaataaaatcattgaaaaatctgtagtacacaatgttggcgtacagtaaaaaagacattaaaaaatgaatcactataatggctgtctgctgtaattttttcttgaacaagagtccaaagccaagaaagaacaagcttgagctaagaggattcacaaaaagcaatattttttgtatcgtgttgtctattcctaagttgaagttcaggacataaccgacatacgttttgatccataacaggacgaccgcaattaagaagaaggccagtcctctttcttttataaatgttttcattgttacactccttttttccgatccagttcgagcgaaacgatagaaaaaacgaacgtatccaatataacacgaatcagcagattagaaaagtgaaaatcgtatgagggagaaagtggcgaaaaacgccgtcgaatcaacgtttcgctttgatattaccaaatgtaaaacaaggtatctttctagaaataaaggaataaaatggtacattgagaattgtatgataaaatataaggtatagataaaaagaggtgaaatgatggatttttcccatattgtgtctgaagataaaattaagcgcgccatcaaagacggggactttcaaaacctcccgggaatggggaagccgctgccgaaggatgacgcggcacacttgccggaatcgctgcgcatgggctatcgtattttgaaaaacgcgggaatggcagaggacgagggcgcgctcaaaaaagagcttatgaccatcgaccatttaatcgaaaagtgctatgacgaaaaagaacgcgagcaattaatcagaaaaaaatctgaaaagcaattgctgcttgataagcttgtcgacaaaaaaggcatgttttcaaagccagcatccgctttttataagaataaagtatatgaccggcttggacgaaacagaccttcttccagctgatttgtcttgtctgcaggatggcgattgataaaagccatcctttttatgttccaagttctatgtcaaaaggtttatgtttttccatctatgggaaatgattcataaacgaaaaaagggtgatgggatggaacgactattagtatggatagagcatatatctgattggctgtggggtccgccgctaatcatcctgctgacggggacgggcttgtatttcactattttgctgaaaggttttcaatttcgctatcctttatacattttcaaacagacaatcggcagtgtaggaaaaaagccgaagggagaaggcacagtcacaccgcttcaggcattgacctcagccctcagttcaacgatcggtgcagcgaacattgtcggtgtgcccgccgctattatgtttgggggaccaggagcggttttttggatgtggcttattgccttatttgccatggcgattaagttttctgaaagtgttcttgctgttcattacagagaaaaaaatgagcagggtgaatacgtcgggggaccgatgtattacataacaaaagggctgcgcatgaaatggctcggcgtattcttctctgttgcgctgattgtggagctgattcccagcattatggttcagggaaattcggtttcagtctcgcttgccgagacgttttctttcaataaaatatacgcaggaatcggaattgcatttttgattgggttagtggtgataggaggggtaaagcggatcggaaaagtaacagagtttgtcgtgcctcttatggcaggggcatacgcaggtgccggtctcctgattgttctcatgaatctatcatcagtgccggcgtttttctctctcgtcttttcaaatgcgtttacctcttcttcagcagttggagggttcgcaggtgctgcgttggcggaaaccgttcgctggggatttgcccgcgggctgtattctaatgaagccggaatgggaacagcctcgattgcacatgcggcagcaatgactgatcatcctgtgcggcaagggttttggtctgtgatcggcattgtcattgacaccttgatcatctgcacgaccaccgcttttgtcgttcttgcatctggtgtctggacagggaagaacgcctcaattgacccggcagcactgacgacggctgcatttcagcattatttcggttctggcggagggtacttcgtttcggtttccctagtcttctttgtcgtatcaaccattatggttgtcattttttacggcgtaaagcaagctgaatttctgttcgggcggctggcaggacacgtgatcaaattcgtttatttagcggctattatcataggtgccgcaggcggagcaaaagccatttggggctttttggacttagcattggcttttattctcgttccaaatgtgattgcgctgttgttattgagcagaaaggtaaaagcgctgtacaccgaattctttacatctgaacagtactacctgaaagatataaggaaaacaaaacagaatcctgtttatcaaacaaaagaagctaaaaactcctagtgctttgctttggcgccgaacaacgctttgctttttatgatcaaataaatgagtaaaggcagcaaaagagaaatcactacattaatgattggtttgattctgttaaagtcgaagctgatttgtatgtaagaagaaccaaaagctgccggttggtgtatacatggctttcgggtcgttttttgagtgtaagagcgataggctgtaccacgatacttcactataatgacggaaatccaaaaggctgtgatgatcaggcctgaacgatccaagatacaatcatcaccatggagcagacacaatttccgcatcagtactgtcccaataacaagagcgccgaggatgctgaccgtctgaccaacggttttcggcaggcgcactccctcttcacggagagcctcagctgtatggcggggaaagaaatcggctagcgggcagacgccgcgctgaacattataccctgaggctttcagtgaagccctctctcgatcctttgatggtcgattctgttattaacttttcaaagtttcttcacaaacaataaatccgcacagcccgtttccaaagtcaaattgtctaaatacgatgtctgagcagccttctgttaataaggtcagattatcgaggttttccttcaaattgggagagatcggtctgtcctgattgtcttcaagctctttgatgagctgaagcgctttgtcgcgtatattcatagaggctcaccctgctttttaatgtcacaataagtgcttgtgacttttagggtaaccttgtctgtttcatatattccagactaggatgaaagcgctataaaaaagtgttgactacctgtatatacaggaatacaatatgattataagttgtatatacaagttataaaaacggatacggaggggttggcatgggggaactgaacaaatcggcacgtcagattgtcgaagcagtcggcggtgctgaaaatattgcagcggcaactcattgtgttacacgtttgcgttttgctttaatagatgaaagcaaggttgaccaagagatgcttgatcaaattgatgtggtaaagggatcattctcgacaaacggacagtttcaggtcgtaatcggccagggaactgtcaataaagtatatgctgaactggttaaggaaacggggattggcgagtcaacaaaggatgaagtgaagaaggcctcagaaaaaaatatgaatcctttgcagcgtgctgtgaaaacgcttgcagatatttttattccaatattgcctgcgattgtcacggcgggtcttttaatggggatcaataacattttaacggcggaaggcattttcttcagcacaaaatcgattgtgcaggtttatccgcagtgggcggatcttgctaatatgattaacctgattgcaggcacggcctttacgtttttgcctgcgttaatcggatggtctgccgtcaagcggttcggcggcaatccgcttctcggcattgtgctcggggttatgctcgtgcatcctgatttgctgaatgcgtggggatatggcgcggcagaacaaagcggagagatcccggtatggaatctattcggcctagaggtgcagaaagtcggctatcagggccaggtgctcccaattttgcttgcttcttatatgctggcgaagattgaggtatttttaacaaaacgcacacctgagggcatacagctgctcgttgtcgcaccaattacgcttctcttaacgggatttgcctcttttatcattatcggcccgattacatttgcgatcggtaatgtactgacttcagggcttatctcggtgtttggttcttttgccgcactgggcggtctgttatatggcggtttctactcagcgctcgtgattaccggtatgcatcacacgtttcttgcagtcgacctgcagctcatcggttcaaagctcggcggcacctttttatggccgatgctggcgctttctaatatcgcacaaggttcggcggctctggccatgatgtttatcgtgaaggatgagaaacaaaaaggcctctccctcacatcagggatttctgcttatcttggcattacagagcctgccatctttggggtgaatctgcgatacagattcccgtttatcattgcaatggtcagctctggcctggccggaatgtatatttcttctcaaggtgtgctggcaagctccgttggtgtcggcggcgtgccggggattttctcaatcatgagccagtactggggcgcgtttgcaatcgggatggctattgtattgatcgtgccgtttgccggaacatacgcgtatgcgagattcaaacataaataacaaatggggagcgggacgtgttgaacgttcccttttcccattttcaatttaaatatggtggtgagacagatgaaaacagaacaaacgccatggtggaaaaaagctgtggtttatcaaatttatccgaaaagctttaacgatacgacgggaaacggtgtcggcgatttgaacggcattattgaaaagctggattacttaaaaatacttcaggtggatgtgctttggctgacgccgatttatgattctccccagcatgataatgggtacgatattcgtgattattactcgatttatcctgaatacggaacgatggaggattttgagcggctagtgtccgaagcacataaaagagacctgaaagtcgtcatggatcttgttgtcaatcatacgtcaacagagcacgaatggtttcgcgaggcgatctcttcaatagacagtccgtaccgtgatttttatatatggaaaaacccgcaggaaaacggttctgttccgacgaactgggaatcgaaattcggcggctcggtatgggagcttgacgaagcgtcgggccaatactatttgcatctgtttgatgtgacgcaggctgatttgaattgggaaaatgaagaggtcagaaagcatgtctatgacatgatgcatttttggtttgaaaagggaatagatggcttcaggcttgatgtcatcaacctgatttctaaagatcagcgctttccgaatgcggaggacggcggcgacggccgctctttttacactgacgggccgcgagtgcacgaatttctgcatgaaatgaacgaaaaggtgttttcacattacgacagcatgacggtcggtgagatgtcttcaacaaccatagaccactgtatccggtatacgaatcctgacaataaagaacttgatatgacattcagcttccatcatctcaaggttgactatcctaacggcgaaaaatgggccttggcaccgtttgactttttgaagctgaaggagatcctatccgactggcaaacggggatgcacgcaggagagggatggaacgctctgttctggtgcaatcatgatcagccgcgcatagtatcaagatatggagatgatggcgcatatagggtgaaatcggcgaaaatgcttgctacggccattcatatgatgcagggcacgccttatatttatcagggcgaggagctgggaatgacgaatccgaagtttactgacatcagttcctatcgggatgtcgaatcgctgaacatgtatcacgcctttaaggaaaaaggaatggctgatcaagagatcacagccattttgcaggcgaaatcccgtgacaattccagaacccctgttcagtgggatgctacggagaatggcggttttacaacgggcacaccatggataccggttgcaggaaattaccgggaaatcaatgctgaagcggcgctgagggatcagaattcggtgttttaccattatcaaaaattgattcgaattcgcaaaatgtatgacattgtgacagagggaacgtatgagttaatcgcaaaggatgacccgaacatttttgcgtatctcagacacggcagcaatgaaaagctgctcgtgatcaataatttttacgggacagaggcggcctttacactgccggactctttagcgcctgacgaatggaaggcagaggtgctgttgacgaacgatgaagcaagggaagggcttcagaacatgacgcttcgcccgtatgagtccattgtttatcgtttaacgaaaccgtgttaaactaagctgggtggtccataatgaaggtgaataaattcatcacaatttataaagacatcgcacagcaaattgaaggcggccgatggaaagcggaggagattcttccgtctgaacatgagttgaccgcacagtacggtacatcaagagaaacggtccgaaaggcgcttcatatgctcgcgcaaaacggttatattcagaaaatcaggggaaaaggctccgtcgtgctcaatcgtgaaaaaatgcagtttcccgtttcgggccttgtcagcttcaaggagctcgcgcaaacgcttggcaaagaaacgaaaacaactgtacacaaattcgggctggagcctccgtcagagctgatccaaaaacagctccgggccaatctggatgacgacatctgggaagtcatcaggtctagaaagattgacggggaacatgtgattttggacaaggattactttttcagaaagcatgtccctcacctgacgaaagaaatttgtgaaaactccatatatgaatatatagaaggagagctaggtctttcgatcagttacgcccaaaaagaaattgtcgccgagccgtgtacggacgaggacagagagctgctcgatttacgcggctatgaccatatggtcgtggtgagaaactacgtctttttggaggataccagtttgtttcaatatacggaaagcagacaccgtctcgacaaattccgatttgttgattttgcgcggcgggggagatgagataggcgcctgcctgcggcagtgcgcttttttgtttggtatcaaaattgatactatccaacaaaaatgtgcgtacttttactttttatcataatggctacaatagagatgagagtaacctaaaggagaggtgttttacatggcagatctaaagaaacaaattctggatgcatacaatttcaggcatgcgactaaggaatttgacccgaataaaaaagtgtcagacagcgattttgaatttattttagaaacaggaagactgtctccgagctcactcggccttgagccttggaaatttgtcgtcgtccaaaatccggatttccgcgagaagcttcgtgaatacacatggggcgcgcaaaagcagctgccgaccgcaagccatttcgtcctgattcttgcgcgtacagcgaaggatatcaaatataatgcggactacatcaaacgtcatttaaaagaagtaaaacaaatgcctcaagacgtgtacgaaggctatttaagcaaaacagaagaattccagaaaaacgatttgcatttgcttgaaagtgacagaacattgtttgactgggcatcaaaacaaacctatatcgcgcttggcaacatgatgactgccgctgcgcaaatcggtgttgattcctgcccgatcgaaggcttccagtacgatcacattcaccgtattcttgaagaagaaggccttctggaaaacggaagcttcgatatttctgtgatggtggcatttggctaccgagtgagagaccctcgtccgaaaacaagatctgctgttgaagatgttgtgaagtgggtttaaataaagaaagctgctcgcttagcgagcagctctttttttatgcctgattcgttctattctgttttctcctctgatgtaagtacattgcagttccgagtgcgctgataagaaatccggccaacaggatcgagtacatggatgtggctgtgtccggaagcaggccgccagccggaccgtctgttcctgatccgcccgaaccgtttcctccagagccgttagtcggttgagtgccgggaggcgtatcatttcctccgtttccgtcagtcggctgttttccgcctggtttgtcggagcctccgccatgactgccgtcatcaccgcctgtcggttggtcggacgggaatgccggcggtttgttgttcgaaccggaatttaagatcgtgtattcgctgaagtggtttgtatatcctgtcaccatatcatcgtcaactgatccgttatctgtctttgtgaaagctctctttttcctgtcgacgtgataaatggcagggttatgagcttcttcaatatcaaacatgcgaagcgaaagctgtacgggctccttgaatgattttatttcttttcctttttgctttactgtaaagtcatatacatctgccaatgacacattcaattctcccgtcgacttgattccgattgcagtgtctgcagttttaaggttcgccattggcatcttcatgctgtaccagtagttgaacaccgtcaatgaaggatctgactctctttctttcaaaagtttgacctgatctttttttactttgagattgataggcttctcttgtgatccttcatgtgttccgtaatagacaagcggcgtgttggcatttttagcgtaaatctcaaatttgtcttcatcaagtgtccagctgccgtccttctgctttgtcggcaggaatacttctttgatccgtccttcaactttaggagagaccttgtttcctagttttttcagctgttcggtgaaaatctcataatcaacgtagccaaggtcttcaccatgggaggcttctgtaaagacagaatatccgtctcctccggcaccgacaaaattatttgttgccacgcggtaggtatcatccgtatttatagcaactttgtctccgttaggcgattcaattttcacttctaacacacggtgcccaggttcgttgtttaatgtaaaggtatattcgattccggccacctgagggaaagcgccgccgccattttccacattgcttaggccttgttcaagggcttctttaatttgttttccggttaaatcggccacgtaaagcgtattgccgaacggcatcacgttgagcacctcgccgagtgtgatatcacctttgtcaatgccggctctgatgccgccgccatttgttatcgctattctggcgccggctgcttctttcgcttttgccagcataccgtccgcgatgaagtttccgagattcgtttctttcgtgcgcacatgctcacgctggccgtcaagcgccacatccgtatagccgactttttcattttttaagtcctctaattcatttttgaactgatcgagcttttgtttggcttctgcattttcttctgtatgctcatcaattggcagcacgctcagatttgatttgtctgtttgcacaacgccattttcatcaaacgcgacatcaacgcgccccaagaattggccgtattcttttgcctgcgccacgatcgtcggttcttcgttgtttacgacctccattttgtcaacgagggtgtgagtgtgtccgccgatgatcaagtcaatgccttttacttttttggctagctcaagatcacggttatgaccgatatgggttaaagcaataattttatttaccttttcttcttcctgaatcgctttgacggtgttttgtgctgtttcaaaggcatcattgaatacgatgcttttgcccgggcttgatgtggtggctgtatcttctgttgtcaggccgaatacggcgactttctctccgtcaacgtctaacagaatgtaaggatggatgccggcctccttcttttcacctgccgtaaaggtttgcggctttttgacaaatgatttcagcttgggctcatttgacacatctacgtttgcgctgacaatcggaaattccggcgcttcaaagtgatagcggttcgctggatcaacggttgcgctgtttccgcttagaaaatcagaaagcactgtcgggcctttatcaaattcatggttcccgaaggtcatggcgtcatagcccatcatgttcatcattttcagatcggccaaaccgttccatttagtaaaatacagatcgccggaaaacacatctcccgcatcaaggagaatgttgtgatttgtttcgctgcgtacttcgttgattttcgtcattcgtctcgctgcatcatcgagatgtgcgtgcgtatcattggtgtgcatgacggtcaggtcccacagtccgtctttaggaggatctggatttgaatcatcatcgaattgcagcttatacacaccatagccttcattcgcagacttgcctacataagcgacgtcgtctgctttatcggcaaatggcttggccaaaagcgaggattcaaacgtcagattcgtgccggaaacaggcgcgattgaccagttgttgtctgcctttggattgactgttttttgttcaataatgtaatccatcagcacctgcctattttcaactgcagagccgtggacaattttatcgctcgtcagatgagggaacccgccgcctcctgacgcacgatagttattggtgactacgagaaattcctggcttgggctgatcggcttgccttcataggaaaggttgatgatccgggatgaatccgcattgatcacttttccgttctcattgtatttagccggttttgtcacatcgacctgatatgtgacaccgtcaatcacgtcaaaattataggagcggaaattctcgttcagcaaggcctggtcgccgcctttagctggatcaatttgattgaattggcctgctgacatctccagccagtccttgacctcgctgcctgtcagcttgacgatttgaacagtattatcgtaaagatacaagtcaccgacatttttaatcgcaagatctccggctggaatgtttgtatagtaattggctccgtttctgccgcctgctttaaacggcgctccagcggataaaatcggcaggttcttgtactcggtatccttcatttctttttcagcgtaccacttttgcgcgtcagtcacgatctgaatggaaggatcatctttgacctgtgcaaagaagctgttaatatctgcttcggttttgccgactggctttcggacatactccagtgtgttttggtgtgtttgctgaatggtgtttgtaacggtttcgtttcttgatgtgacgttgccagcaatagattcaatacttcctttggaatctgctactttccatgagccgtccgccttttcaagcttgaggtcaatcacgcctaaatatttgccccagctgcttggcatgacgacaggaatgccgttaattgttcccttttccacattgaactgagcaacacccgcatactcggcggaaggaaagagtccgtgctgatggcccgagataatcgcgtcaatgcctttcgttttagtggcaaggtcaaacacggcgttttctgcgcctgatgattgcgcctgcttttcaatgccggtgtgggcgagggcaataatgacatctgcgccttccgccttcattttcgggatcgtttcattggcggattctacgatatcctgcacctgaacttgcccctcgagattctttttgtcccatgtcatgatttgcggcgggacaaagcctatgtagccgacttttactttctgctcattaccgttttcatcaatgagggttttttcattaatcatatacggcgtataacggttttcgccgctagttgttttgacgttggcatttacaatcgggaaatcggctcctttgattgtgccgtcgagaaagtcgagcccgtagttgaattcatgattgccaagcgttccggcgtcgtatttcagcgcattcatgacgctgataatcggatgggttttcgtgccggagataatgtcgtctttttgatatttcaccgcgtattcacccagcggattcccttgaatcaagtcgccgttatccacaagcagagtgttagggttttgctcgcggtgcttttggatcaattgcgctgttcttgccagaccgaaatccgccgtttctttgtcgctgtagtaatcgtaatccatcatgttggcatgaatatcagttgtagccaaaatactcagatgcacctgaggagccgcgctttcttctgcatgaatgggtggtgttgggaggattaggctaagtatcataattgggggcaaaagaatacggagaatgttttcgacgtgtgttcgtcttttctgtattctcaccagttctccacctttcaacgaaatttgtgttacagctcctattgtaagaatattttgtaactatttgtaggtgtttctttatgattattgtaaaagggagaaaaatgagtactatgtagcagcttcaagcgacaaatactgggtatttatgcttatcgtttgtccatattcgcaaaatgtttattttagtgtggctggggtagagtgttttatgtagacatataaagcgggaggttatgaaccatggggaaaaaaattgcagttgttttgacagattactttgaggacagcgagtacactgagcctgcgaaagcctttaaagaagcgggacatgaactgactgtcatcgaaaatgaaaaaggaaaaacagtaaaaggcaagcagggaaaagcggaagtgacggttgacgcgtccattgacgacgtaaacccttcagactttgatgcgcttttgattcccggaggattttcaccagaccagcttcgcgctgacgatcgtttcgtccaatttacaaaagcgtttatgactgacaaaaaaccggtattcgccatttgccacggcccgcagcttttaatcaatgcgaaagcgctcgacggccgaaaagcgacgggctatacgtctattcgtgttgacatggaaaacgccggtgccgacgttgtggacaaggaagtggttgtttgccaggatcaattggtcactagccgcacaccggacgatataccggcatttaatcgcgagtcattggcattgcttgagaaataagaaaaaacggacgctcttgggcgtccgtttttttgttgcttaggcttgagcacctgtcagtttcttgtacctgtaatacaagaaagcagctgcagccgttccgatgaccgcaatgccgaagtcgaatatgaaaatatgagcgatgccccccgcttttgcgataagccctgttgcaatcggcagcagaatcgatgcaaggcttgaagcggtcgctacaattccggtaacggttccttttcgcttccagaaaagctctgtcattaacgtaatggtaatttgaaacacacccgcagttgaaaagcctaagaaaaaggcagtgatgtccagcacaactgggatatgaacggtcagcatgactgcgagcgtacataaagtaataataggatataagagcgttatgaagacaggtttgacccatctgttcagcaaaacggctaataataaaacagatgccagagatcctatactataatagctcagcaattgtacagatgctgattcagctaaaccggctgccttttgcgcgtagctcgggagccagatttgagaaaccgtaaataaagccgtggatgtaaaaccgatgataatcagtgcggtgccttctttctgaaaaacgggttcagacaagaaaacgggagattcctgttgtccgctattagttggtttcttatgttttttaggaaacgaaagcgttgataaataaataatattcaggagatagaccgctgccggcagataaaaagcaaatccgtaaaacatgctgtggtctgctaaaaatgtgatcaaaagcggcaaaagtgcggccccgacagacataaaggccttgaccaagacattcgccgaaccggaagcagacggaaagagctcggttagggccggatatgttccggcatccatcgctgaatttgcgactccggctaataaggcgaaaacaaacgccagctcatagctcggtgataaaggaataccgactaaaaagacggccataattcctgcagaagcgacaacaagcggctttctgccgattttatctgatagaacgccggaaatgccgtatgtcagcagtttgccaaacccgatagcggcaatgacataactgatgccagtcggatcggtattccactgttttgttaatgaggacatattggatgcgagaatgatgttgaccatccccagaaagaagtagttgatatacattccggatgctgttttgatagatgtcgtttgcatgcttgtactccttcaaatcttattcgaacactttgctgtttactgttctaaggaaaattggtttggggaaatgataaaaaagactcgccgagtttccggccagtctccattatttacgaagcgaggctaattcttgagcaatcgcctgcatttcacttgggctgaatgattcttttttcatcaccatgctgtgaaggtacgtgaggtcttcaatcttctcatcactgaaatcctccgctttgattacgccgacgttcagcatgttcagcttttgggaaatctcttcaatcatttgagttaatgtttctgtatttgggctggacaaatggttccatcctttctatgcgcaatataggtatgttttattctaacagaattccatcagaaaaaaaccctattctaaaagcaggctgttcattccaaaaaagtgaagacatcagttgaaaagaaaatgaacatcctactaagatattcatgaaggtttctttttagagaaataggggcaaagaatagggaggttggacaacatgataagcgtgttatttgtttgtttaggaaacatttgccggtctccgatggcggaagcgatttttcgggacctggcagccaaaaaaggattagaggggaaaatcaaggcggactcagcgggaatcggcggctggcacatcggcaatccgccgcatgagggaacgcaggagatattgcgcagagaaggaatcagctttgatggcatgctggcgcgtcaagtcagcgaacaggatctggccgattttgattacatcattgcaatggatgcagaaaatatcggaagtctcagaagcatggcgggatttaaaaacacctcacatatcaaaaggcttttggactatgttgaagattcagatcttgccgacgttcccgatccttactacacagggaattttgaagaagtctgccaattaatcaaatcgggctgtgagcatctgcttgcgtctattcaaaaagaaaaacaattgtgagtgaaaggagaatttgcatgaacaacgaacgtttaatgctgaaagggatatttctcggagctgcggcaggtgcagcgttatcactgctccataagccgacaagacaggcgtgcggcatgagatggctgacatgcaagcataaactttcactgtataaaagcaatccggagctgttaaaaaacactgttatcacaaaagtggatgaggccaaaaagctcgcccaaacgctttcaaaggaagtcgactttgtgaaccagcaggtgaaagagctgaagaaaacaacgccgcaagtgatggaactcgtgcaagaaacgaaagagcatttttcaaaaaaatgatcaaacatgcgaggtgaggcgacatgagttttttgaaagagcttttcagcagatacacccttcatgaaggacaaagtaaatcagcggagctggcgtatttttttctattgtcactgtttccttttttgatttttatgctgacgctcaccgcgtatcttccgctttctaccgatgatgttttaggagtcatagaacaatatgctcccgccagtgcgatgtctctcgttgaatccattacccatcaaaccttaaataatcgaaatggcggtttgctgtcattcgggattatcgccgcattatggtctgcgtctaatggaatgaacgcgatcgtccggtcgctaaaccacgcgtatgatgtggaagaaaaccgctcttttatcattgttcgtctaacctcgatttttttgacgattgccatggtatttacgattttagtggctttgcttctgccggtatttggccgggagattggaaggctcgcttctgactttgtcggcgcgtcggatctgtttttatccgtctgggccgccattcgctggggtgtcagcccgcttgtgcttttgattgttttttccgcgctgtatgtgattgcgccgaacaaaaagctgtctctccggtttgtcatgccgggtgcggtctttgcgactatcggctggatcattgtcagcacattgttttcattttacgtcagcacgtttgcgaactatagcgccacttacgggagcatcgggggaatcatcgttctgatgatttggttttacttgagcggcattttaattatcctaggcggagaaatcaacgctcttttacataaacgtaaaaagcttcctgatgaaaatccctaccattagcgcaccctataaacgaacttcggttcaaaaagaagtcggggggatatcgtgatgaccaagcatacgaaaaaaggcggaagccataacaaacaaaactcgaaaagcaaatcgagccataaaacaagcggaagcgccaacggacaaaacggctaccattagcataaaagcctcctgacatgatgtcgggaggctttttgattaagaagatgaagaataggtttcagccggtgaccagcttttcggtttgcccagcacaagggccagccacacagcgctaagcgtgagagtaatgaagtagaacaagtttgcgctttcaaatgtctgcatataccagccgccggcaaccggaccgaggatgctgccgagactgaatgtaatgccgcaaagcaggtttcccgccggcaggagatgaggcggaagaagatctgtcatatagctgatgccaagtgtaaaggttgatccgactgccattcccgcaataaaaaagcagccgccgatcacgtaaggcgaaggaaatacaccggcgatgaaaaagcaaagagccccagtcagtaaaatcaccagcagcacattccgcctgccgtatttatcgctgaggatgccgagcggaaactgaaaaataatgcttccaatcgcaaatgcgggaaggatgatcgctactgcgtctactgatatccccaaacggagcgcgtacaccggaaagcttccgttcagcgccgtttccaaaaagccatagccaaatgtaggcataaaggcaacccacccaaacagcatggcctgataaaatcgcctgaaactattgtctgatttggtttcatgaggactggtttccgggtatgcattttgtagaaagaaaacaaaaagccacgcaaacagactgatgcagccggacacgataaaaggaagcgacggactcagcttgacaagcggcaccatgaacgggcctgcggcaaagccaaggccaaaggaaagcccgtaaatagacaggtttcttccgcgattttgttttgatgacatggaggtcacccacgtttgcgtagaaaagtgaagcatgtggtcgccgattccaatgaacaggcgaagcaggaaccagacccaaactgactgaagccaaataaatccgaataagcttaaaatgacaatgcttccgcccatgacgatcagcggcttgaacccgagctttctgagcggcgcttccataaacggcgaagccaaaagcacaccgatatacagcccggtcgcgtgcaggccgttgatagcagcggattctccatttgtttcaaaaatgattgaaatgacaggcagcagcatgccttgtgaaaacccggaaatggatacgagcaagacaaggataaagaaatgaaatcgtgacatcgtgtcagttctccttatgtggaatctatgttgatcgtacaatgttttccaaaagcaggcaacctgaaaaaagcctatatcacgctatacatttgccctcgtgtaatcatgaaggtttttgtgaagaataaaaataaaacaagtcataaaaaaggagctatttcaccatgaatcgtatcttttttattttagtggcggccggtgttccgctttctgtgattggcagtttgatgcattggccttccgcggttctatttgccgtttattgcgtgacgattatcgctcttgcaagctatatggggagggcgacagaatcactgtccatcattgcaggaccgcgtatcggcggtttgttgaatgcaaccttcgggaatgcggtggagctgattatttccctttttgcattaaaagaaggcctgacaggaatcgttcttgcctctttaaccggttcagtgctggggaacctgctgctggtagcgggcctatcgttttttgtcggcggtttaaaatataagcggcaggaatttaatatccatgatgcccgccataactccgggcttctgatttttgccatcattgtcgcctttgtgattccggaggtattctctgttggtatgggaaacgccagcaagctcaatttaagcatcggcatcagcatcattatgattctgttgtatgtggcggcgctgtactttaaacttgtcacgcatcggggcgtttatcagccgaataatgccgctcagactgaagaagaggaagagccggaatggtcagggaaggttgcgacgattgtcttgtttgcggcaacgattgtggtggcatacatatccgaaaacctggtccatacctttcactcggtggctgaacagttcgggtggagcgagctgtttatcggggtcatcatcgtggcgattgtaggaaatgcggcggagcacgcgtcagcgattattatggccttcaaaaataaaatggacattgcggttgaaattgcagtcggctctacgctgcagatcgctatgtttgtcgcaccggttctcgtcatctgttctatcttttttccgacaagcatgccgcttgtatttacattgcctgagctcgtcgcgatggtatcagcggttctcttgatgatcgcgatttcgaatgacggggattccaactggtttgaaggtgcgacactgcttgctgcatatgtcattatggcgatcggctttttccttctttaacctgaaaaaatgatggataacaacaaagcgggatgaaaagactaagggaaaatgccatagaaagagtgatatgatgaaaaagctatttcattccacacttatcgtgttgttattctttagttttttcggcgttcagcccatccacgcgaaaaagcagtttaaggttcctaattctgtcgcaagcatttcaaaggaaaacacgtatccgaatgcttcacaggatcagccaatgcttcagccgagcaagctggcaaaggaattgctcgatcattctgaggtgaagattgaaaatccgcatctcatcaaaatgctgaatgaatccaacatatccggcacaccgcttgcagtagggtaccgggcgacaatatttctcgggaaatgggcgctcggctatgaatcaaatgaaacagtcgcaaactgggaatataaaaaaatcaatacaaaccgtgcggataaccgcggcgggaaagaaacggctgaaatgcattatgcccaggaacagcagtacagagtgaagggcggcctgacagctaaagttccaaatgctgaagatgtcaaaagcatgatgatgcaaaaagcaatgaagaaaacggacctcccgcttgcatttgagacggtcattggggctggcacaaaacgggatcagatttataaagtcgctcctaaaaaaatcggttatttacatgcatatgcaccggctgtgaatgaaaaaggaaaagtaacttacggagaagtgtacttagtgctgaaaggaaataaacgaaaactcgtcgtgaaaaatgtcacgtcacagggcatcggcgcgtggattccggttcaagatcatgtcacatttggctttcagctttcctcactgccaagataaataaaaaactgattccaactcggaatcagtttttttgtttattgggttctctcgattcggaccgcttcctcaagcatttgcacattgttttggtagagcaggcgaacgagaacccgtctgactgcaaggctggcactgaaataatcatcatctttcaccatgcctttaaccgtaaattcgacgccgcgattgattttattcaatgcggtgatgccgtggatttgaaatggttctgtcggattgccgaatacatcccgcttcaatgaatcacgaagctcttcattcagcatgtcacatgcctcttccaacacgctgtacacgcggtccggatcttctttaaagctgataagaaaggattcggtaatccgcataaaatcaatattatagttctctatttgtctgacctcgccgttgctgatggtgagcagcttcccgctccattctcggatttgcagcgagcggaggccgatttcctccactgtcccgttgaacaagttgttgacggtgacataatcgcctttgtgcagctggcgttcatatattaagaacacaccagccagcacatctttgatcagcgattgggcgccaaaaccgatcacgatacctgctacgcccgccccggccaatatcttgccgaaatcatgcacaaataaagaaataacgtaaaaaataaaaccaattgtcgccgtatactgggtgacagaacggacaaggctttcaatcgttttttcctttttttcttcaataaaatccgtccgtttaaaaaatagctgtaccagccggttgatgataaagacaccgatccaaaggataacggcaacgaggagaatatcgacgattttagtttgaaaaatctccgtaagtgtttctttcatccgcatctaactcctggcttgacgttttgtgaagtctgtatcctgataataactgtttttgacaagaacattcggtccgaggcaccggacattcgggcagtggcaacttagttctttcgcaagcttggtctctctccacttttcataggcggaagggaggctgtccgtctgaatgttgccaagcggcggggtatcaccgaaatcggtcacgataatgtttccgtcgaaaatgttcacattcaggcgggaccggccgtcagggtcatttcgcactgtgacgtttttcgccgcgcgaagccggcgaagcagcttttggtcgtcttcgtccggactgcaggcataaaacggcagcgttccgaacagcatccacgtattttcatcacgaatatccagcaagcggtgaatggcctgtctcatctctttcaggctgagggattcaagagcgcttgcgaaatcgcttggatacattgggtggacctcgtgacgctgacatttcatatcttctgtgatttggcggtgaatatgctcaatatgcggaagagttcgtttgttcagcatcgtttccgcagataccattactccggcatccacgagcgtgcggctgttttcgatcattttttcaaaatagcgcgcgcgctgttcgaaggtcggttttctgtccatcatggcaaagccgatttcagcaaaatcttcaactgtaccccagttatgagaaatatgtagcacatcgagatacggaatgatccattcgtaccgctcgatgtcgagggtcagatttgaattaatttgtgtccgcacaccccgttcatgggcatatttcaataaaggaacaacatattcttttactgatttcaacgaaagcatcggctctccgcctgtgatgctgatggatctgaggcgcgggatttcctccagccgttttaacagaagatctattggcagagcattcgggtctttaggctgcaatgtatagcctacagcacaatgctcgcatctcatattgcacagtgtcgtcgttgtgaattcaacgtttgtcagctgcatgtctccgtattggtcaacatccatataggcttcccaagggtcaaactcgggcgtaatcggacgcagcttcgtgttttgtgtcatgactatctaactcctttataaatgggcatactaacgctgccaacagttaattttagacctgatttgccaagatcgcaagtagcgcggcgattgaaaaaccgcaaaaaatgagctaccattataaaaaatgaatggaggaacagaatggggaacgccgtaaacaataaagatcagcagattgattatttaaagaacagacttgacatgtttatgaacgtcatcgattcattagaccctgaagcaaccgacgttgaagatatagacaggctcatcagcatgcttgatgacctggaagccaaatacgaacgttttaaaaaagattgggaataaaaccgcgcgcccgccgcggtttttttattggcataaagcaacagtataaaacaaagtctctatctgtaaaataagaaaaaatgcagaaggagcgctggccatgaagtggatgtgttcaatatgctgcgccgccgtattgcttgccggaggtgcagcacaggcggaagcggtgccgaatgagccgattaattggggctttaaacgaagtgtcaatcatcagccgccagatgccgggaagcagctgaacagtttaattgaaaaatatgacgcgttttatttagggaatacaaaggaaaaaacgatttacttaacgtttgataacggatatgaaaatggctatacgccaaaagtgcttgatgtcttaaaaaaacatcgcgtaacaggaacgttttttgtcaccgggcatttcgtaaaggaccagcctcagctgatcaaacgaatgtcagatgagggccatattatcggcaaccattcctttcaccatccggatttaacgacaaaaacagctgatcagattcaggatgaactagattcagtcaacgaagaggtttataaaattacgggaaagcaggacaatctgtacttgcgtccgccgcgtggcgtgttcagtgagtacgtactgaaagaaacgaaacgcctcggctatcaaaccgttttctggtcggtcgcttttgttgattggaaaatcaacaaccaaaaggggaagaaatatgcctacgatcatatgattaagcaggcgcacccgggagccatttacctgctgcacaccgtatcaagggacaatgctgaagcactggatgacgcgattacagatctgaaaaaacagggctacacttttaaaagcattgatgatctgatgtttgagaaagaaatgaagatgccgtccttgtaatgagaagagcctctcctgaaatggagaggcttttctttattttatacatttaatcagtgcggcccagtccagatctccgaagccctgttcaatcccgctttcaaaatggctcttggccagctcggcaagaggaagatttgcagaaacccgttttgcggcggcgagtgccaggttggtatccttcagccctaaagacattttgaagccggccggctcaaatttctgctcggccataatggttccgtaattttgatagactggagaaccaaagagcgcgctggcgatttctaaaaattgtttttgttctaagccgtatttctccatcattaagaaggattcagataacgcctccagcatagacacgagtaagaaattgatgctgattttcgctgcatttgctatcttgctttcttcgccgacgtcaaatacctgctggctgaggctgtcgagcagaggcttggcggtttgcttcgcttccgccggtcctgctgttatgatgcgaagcgcggctttggctgcggcatccggtctgccaaggacgggagcggcgagaaaggattgtcctttctctgcatgagccgctgcgagcttttctgagaactcaacactgattgtgctcatcgagatgtgaatgccgttctctgctaatccttcaagcagcccgtcttctccgaatgtcacggtgctgacagaatcatcatctgcaagcattgtgatgacaatatcagcggactttgccgccagccgcggcgtatcagctgcctgtgcgcctgctgtgacaaggtcttctgtcttttgtttcgtccggttatagacagtcaattcgtagcctgcttgaagaacatttcgggcaatgggctgtcccatattgccgagtccgatgacagcaattttcaatctgatcactccctgaatattttttccattataaacaatataaacagaatatgcatagcaatcggcttacaacaaaaaagaacagcttcccgctgccctcatttaaaaatattgaaccatcctttatgtacaaaccaaatcagcatcccgattacaagcgcagccatcaggccaagtacagcaaaatatccgtatttccaatgcagctccggcatgaagtcgaaattcataccgtatacaccggcaataaaggtgagcgggatgaaaatagttgatacgatcgtcagtgtcatcataatcgcattcatccggtttgagtttagcgtcacgtagctgtcacgcaaatcggacgtcatgtcccggttggattccacaatttcagacaactttaacaaatgatcgtatatgtcactgaagtaggctttcgtttcccgctgctctttcacatggtcaaggcttaaaatccgatagagcaaatcacgcatcgggataatcgtccgtctcaaatgcaataggtctgttctgagatcaaacacctcattcatcagcgttccatacgttttgtggggacggctttcttcaatttcattcagccggtcttcgattttatacacgagaggaaaatattcatcaacaagctgatccatgatcatataagaaatatgcccgggcccttttttcaatatgtccggtgaagcatacaaacgctcccggactttagcgataccgggcgtttcgtgtaaatgaaaggtgacgacaaatttttcgccttgaaagatatcgacttcctccgtctcaagtgtttccttattcagcgcatgaatcacgtaaaaacgatagccgtcataatggtcaagcttcggccgctgcatatgctggaagcaatcctcaatggcaagcgggtgaaaatgaaaaaaatctctcaataacgccgtttccgtatcctccgggccgtaaaaatcaacccagtaccatgcaatatcaggctgttccactcgttcgattggtatatttttcagcagctgatgctctgttgtgattgcggtaatgttgatcataaacaaccctccacctgccattatatcatgcggtctttatgagaaaagtatacggtactctctgcctaattcaagcggcatgttatactgaacaaaaacggaaaaagggtggatctcatgtggaaggaaaaagtatctgtcacgcctccgtatcattttgaccgcgtgctggacaggctgtctttagaccccctcaatgctgttgatcgagaggcgagggaagtccgtgtgccaatcagaaatcaagcgggggacgtatgtattgtaaaggtacaggcgttaggccatgcgggcgagcctgagttcctcgtcagcggggaaacggatcagggagaaatgatgaaggaaatcaagcggatttttcaatgggaaaatcatttgcagcacgttctggatcatttttcaaaaacgagcctgtccgccatttttgaagagcatgcagggactccgcttgttctggactacagcgtgtacaactgcatgatgaaatgcattatccaccagcagctcaatctttccttcgcttacacgctaacagaacggtttgttcatgcgtttggtgagcagaaggatggcgtgtggtgctacccaaagccggaaacgattgcagaactcgattatcaggatctgcgtgatctgcaattcagcatgagaaaagcggaatacaccattgatacatcaaggatgatcgcagaaggcacactcagcttgtcagagctgccgcatatggcggatgaagacattatgaagaaactgatcaaaatcaggggtatcggcccgtggaccgtgcaaaatatcctcatgttcggacttggccgtcccaatttattcccgcttgccgatatcggcctccagaatgccatcaaacgccattttcagctggacgataagccggcaaaggatgtcatgctggcgatgagcaaggagtgggagccttatttaagctatgcgtctttgtatttgtggaggagtatagaataattcgtctgacaatgaaggaaatcctgcaaacgtgttatactagaaagatgtgaaaaaaccatttcactttctgccatccgcagaaagcttcatatagaaacggagagaacaacgtgaaccaacaaaagaaacaggcgcccgtcgaactgaaggtcggacaaacctttccgctgacgattaagcgtctcggcattaacggagaaggtgtcggctattttaagaaaaaagtcgtcttcgtgcccggcgcgcttcctggcgaagaagttgttgtgcaggccacaaaggtccagccgaagttttcggagggccgcattaagaaaatccgcaaggcatctgagcaccgggtggcaccgccttgccctgtttatgaacaatgcggcggatgtcagcttcagcaccttgcatacagccagcagcttcgggaaaaacgcgatatcgtcattcagtctcttgaacgccatacgaagtttaaagttgaaaacatggaaatcaaagaaacgattggcatggacaacccgtggaattaccgcaataaaagccaattccagatcgggcgctcgcaaagcggcagcatcatcgccggcttatacggccttgattctcatgacatcgtgccgattaaagactgtatcgttcagcatccggcaacgaacaaaacaacaggcatcgtccgccgcattttagaggacttcaatgtgtctgtttataatgaaagaaaacgaaaaggtgacgttcgcacgatcgtgacgagagtcggctttgaaacaggcgaagtgcaggtcgtgcttgtaaccgcaaaagaaacgcttccgcacaaggaagaaatcgtcaaagcgattcaaaagcgattgccagaggtcaaatccattattcagaatgtaaacggggcgaaaacttcagtgattttcggtgagaaaacaaaaccgctcgccggaaaaacagtgattcaagaagtgctcggcgacgtatcttttgaattgagcgcccgcgctttcttccagctcaatccggaacagaccgtcaagctgtatgatgaagtgaaaaaagcggcgcagctgaccggaaaagaaaaagtcgttgatgcgtattgcggcgtcggcactatcggcatgtgggtggcggacggagcgaaggaagtccgcggcatggacgtcatcaaggaatcaattgacgatgctaagaaaaacgccaaaaaacacggcatggcaaatgccacatacgtaacaggaacagccgagcactggctcccgaaatggacgaaagaaggcttccgcccggacgtcgtcattgtagacccgccaagaacgggctgtgacagcacgttcctggacacgatcaaaaaagtcaaaccgaaacgctttgtctacgtttcctgcaatccatccacgcttgcgaaggatttgcagacgctgtcgaaggactatcgcgtggactatattcagcctgtcgatatgtttccgcagacggcgcatgttgaagcagtggcgagacttgtattgaaatcgtctaactaaaataaacaatacctaataagacctggatttcggtaaaataaacaattccgatttccgggtctttttcatgtgcagcccttgtcctgactgtctgttctcaattttatcttccttctcattctcggagatctttattttaactggcgaaaagagttgaaaaaacgtgttgaaaagcgggtgaaaaaaagcgttatttaaccgggaaaatttccttccagtatgattaaaatacatgagaagaatgatgtgaaatcatagatatttttttcataatttgtaaaattatatattgacttgcagttattacgtgtgaaatattgatgataggaatataaggaaaggtatggcgtatatcatttcaagagtcattcgatgtaaaaagttgaaacattgtaataaacgaaagaggtgaaaatgatggccaaccccattttaaaatgaataacgtatgagcactacaacaattaaataatagtgccgacgataacaactattacagtaatacctacaatggttatatccttgcgacaatcatgcttcataataatttagattgacacttggctaaaaagtattgcagagaaggaaatggataactaaatggataaagtatataaaaaacgaccgttatataaaagaagttggtttcaaacatttttggcatttttagtatctcagctttattttaattttgtagaattaacgggatggggtcctaagtatagagaaatgaatggattcccagcaaacatagttgaactagatttctttcaaacatatctttcattctatgataatccatggtttaatattattactgttttcttgggagttttcactattatacaaataattacaggggtaacaaaggatattcgaaattaaagcaataacttctgatgccttatttaatgatgaaagaaaatgtacactttcttaattatcttatgagtgaagactgcgacacttagtcagcagtctattttatggttctggatcaggattaccgaattataaccctatacaaatatatagtaggttgccacttgctgcgttggttattttctaaatcatgagcaaatcccaaatgattcagattgaagttcttgaattcttttaaataagggtttattttctcttctcatcctctttactccatgtgattcacaagtggtagcagcttaagtagaggttttttcattctcttgagtattcagttataccacccccaactcaatttgcttaatcgaagtttatctcttgaaattagtttttccgcaaatatgatattgagatacggatatggtgtagcgttaaatatcttatcttcaataacagggcaattattttgcgttggtaatatggagaactcatatgatattctatttaggttggaatcctttttatccaaaagttcaaaagtaaggccactaagaaagacgaaggtcagcgcgagttaaccacaatataaaaaatagggtagataatcatcccacgtgaaatgttcaaaatttactatagattgataagaaatgctttcgcatgcgataagtgtaaaaagaagcatggtcagtttttaatttgggataaaggttcagccgtatcccataatgaaaggatttgaatgtattatgacagataatttctggcgtgaattgccacggccattttttgtactggcaccaatggaagatgtgacagatgttgttttccggcatgtagtaagtgaagcaggcagaccggatgtattttttacagagttcacaaactcagagagctattgccacccggatggaaaagatagcgtgcgcggccgtttgacttttacagaggatgaacagccaattgtggcccatatatggggagataagcctgaaaacttccgtaaaatgagtattggcatggcagagttaggatttaaaggactagatatcaatatgggctgccctgtgcctaatgttgcggggaatggaaagggaagcggccttatttgccgtcctgcagttgcggcagaattaatacaagctgcaaaagcagggggattgcctgtaagcgtgaagacaagacttggatacacggatgtggatgaatggcgcgagtggctgacacacattttgaaacaggatattgccaatctttctattcatctgcgcacaagagcagaaatgagcaaagtagatgcgcattgggaactcatcccggagattaagaaacttcgtgacgaggtggcaccagatacattgttaacaataaacggggatatccctgaccgccaaactggcttaaaacttgctgaacaatacggtgttgatggaattatgattgggcgcggtatttttacaaatccatttgcctttgaaaaggagccgaaagagcatagcagcaaggaattgcttgatctcttaaggctgcatctggatcttcatgataaatattcagcattagaagcccgtccgtacaagcctcttcctcgctttttcaaaatttatctccgcgggttccgaggggcaagtgaattaagaaatcaatgcatgaacacaaagtcaacagatgaagtacgtgcattgctcgacgactttgagagaaagtatcttgatgggatagagtaacagcagtgcttgattcaaaagaggctaacacaattcttgactaaaataaacctggattttcggtaaatccgggtcttttttgtacgcagcttttactcagcctgtcttttctctaatttattgtaagtaaataatggtatatttagtggagatatcttataaagggggagaggaaaatgaaacgactatgcatcatcccctgcggcaagaaaaaaatctgggacgtccagcctgatgccgggccggtaagagcagaggacgcttatctcagcccgtttcatcaggcgtgcgagcggtatgcgaaagcatttttcgatgagtgggtgattttgtcggcgaagcacgggttcctccgccctgatgatctcgtttcgggaaattacgatgtcacttttggcaccagtcatccggaaatcatgacagcggacgagctgcgccgtcaatttcacgaaaaaggcttttctgatatcgaagagctagtcatgcttggcggaaaaaaatatcgaagcgttctaaacgccgtcatcggagagcaccagcatatcagctggccgctatcatcatacaaaggcataggctacatgctccaagcgctgaaccgggctgttgaagaaaagcatgaactgtagcatgcacatatgaagaaaagagtgtgaacatgaaaaaacttgtgtttggcttgcttgccattgcattattcggatgcggactatatatctatcatgtatggttcggtgatccattttcgaaaaatgctgcagaacagaagctagtctcttatgtgaaacaaacctatcctaagaaagaaatcaagatcacgaatggggtatataacgctaaaacctctgaatatgtattcggagcaacctcccaatctcatcgctacccaatgtgtacgaagggatttctgcatcctaaagtaacgtgcgatggaattgaagaagcgtataccgaatcagtatcaaaacatgtaaatgaagaagcaacgaaggcaatcgaagcagatctgaaaaaagcggttcctcgacttataaaagctgatgctgctttgagtattgaaaacgaacagttcacgttagatacaaaatggaacaaacagctggctgaaaaagcgcctatgagcatgacgattcagttagacgccagcgggttatcaaaaacagatgccgcaaagatggcggaaacggtcagaaaaacgcttaatgaaaagggatatacatactcaaacggcacgatagactgtatgcagaaggacggggacggcggtatcggatatgtcaaatattcaattgattttctttcaaaagcagctattcagtcaaacgatgcagaggaactaggaagttaaaaagatttccaaggaaataaatacgtcgatcattgtcaaaggccgggtgatatccggtcttttttttgcatgctgtaaaacgagacaaatgaatcagtttgagacaaaacgagacacacgtctcaaactgtctccaaggtgaagacgagaagactgattttacgggctcaaaagactggcacacttcttgcatttataatggtgaaccctaaatagaaggaggcgcacaaaatggaattgttaaaacgagagggcttgtcattaactgaggaaaaagcgctgtggatgtaccaaaagatgctggagatcaggggctttgaagacaaagtgcatgacctgttcgcccagggagtgcttcccggattcgttcatttatatgccggtgaggaagccgtggctgtaggggtgtgcgctcatttacatgatggcgacagcattacaagcacccacaggggacatggacattgtatcgccaaaggctgtgacctggacggcatgatggcggaaattttcgggaaagcgaccggattgtgcaaaggcaagggcggttctatgcacattgcggatcttgataaaggcatgttaggcgcaaatggaatcgtcgggggcggctttacgctcgcatgcggatcagcgctcacggctaaatataaacagactaaaaatgtaagcgtttgctttttcggggacggggcaaataaccaaggcaccttccacgaagggctgaatttagcggctgtatggaaccttcctgtcgtatttgttgctgaaaacaacggctatggcgaagctaccccatttgagtacgcatcagcctgcgattcaatcgccgatcgggcggctgcttataacatgccgggggtgacagttgacggcaaagatattttagcagtttaccaggcagccgaggaagcgatagaaagagcaagaaacggcggcggcccgtctttgattgaatgtatgacctacagaaactacggccatttcgaaggagatgcccaaacctataaaacgaaggatgaaagagttgagcaccttgaagaaaaagatgccattcaaggttttaaaaactaccttttaaaagaaacagatgctaataagctgtcagacattgaacagcgtgtcagcgaatcgattgaaaaagccgtctcgttcagcgaagacagcccatatccaaaagattcggagctgctgacagatgtgtacgtgtcatatgaaaaaggaggaatgtaagagatggcgagagtcataagcatgtcagacgcgatcaatgaagcaatgaagcttgcgatgagaagagacgaaaatgtgcttttgatcggtgaggatgtcgccgggggagcggcggtcgatcatttgcaggatgatgaagcatggggcggtgtattaggggtcacaaagggactcgtacaggaattcgggcgtacaagagtgctggacactccgatttctgaggcgggctatatgggtgcggctatggctgcggcatcaaccggtttgagaccgattgccgagctgatgtttaacgattttatcggcacgtgctttgatcaggtgatcaaccaaggggcgaaattccgttatatgttcggcggaaaagcgcaagtgccgattaccgtccgcaccacatacggagcagggttccgggccgctgcccagcattcacaagcgctgtatggccttttcacgagcatccctggactgaagacggttgttccatccaatccgtatgatgccaaaggtcttctgcttgcagcaatagaagataatgatccggtgttcttctttgaagacaaaacgtcctacaacatgaagggcgaggtgccggaagattattatacaattcccctcggaaaagcggataccaaacgcgaaggcaatgatgttacgctctttgcagtcggcaagcaggtcaatactgcgcttgaagcggctgcacagctttcagaaaggggcatcgaagccgaggtcattgatccgcgcagtctgtcccctctggatgaggatgcgattttcacatcgttagaaaaaacaaaccggctgatcatcattgatgaagccaatccgcgatgcagcattgccacggatattgctgcgcttgtcgctgacaagggctttgatttgcttgatgcgccgattaaacggattacagcgccgcatacaccggttccgttttcaccagtgcttgaagatcaatatttgccgacaccagataaaattgtcagcgtcacgcttgaattgcttggcgagccggcaatgaattaaagggggaacacaaatggcggtaaaagtagtgatgccaaaattgggaatggccatgaaacaaggggaagtatcgatatggaataaaaaagtaggcgacccggttgaaaagggagaaagcattgccagcattcaatcggagaaaattgaaatggagatcgaagcgcctgaaaaaggaacgctgatcgatatcaaagtgaaagagggagaagaggttccgcccggcacagctatctgctatatcggggacgccaatgagtcggtgcaggaagaggcgagtgcgcctgttgctgaagacaatatgccgcaagccgttcagcccgtcaaacaagaaaacaaacccgcagcctccaaaaaagatcgaatgaaaatatctccagtcgccagaaaaatagcagaaaaagcaggattagacctaaaacaactgaaaggaactggaccaggcggacgaatcgtgaaggatgacgtaacaaaggctcttgctgaacagaaaaaagatcaggcaaagcctggttcggaacagaaagcgcaggaaatcccggtgacaggcatgagaaaggtcatcgctgcccgaatgcaggaaagcctggcaaacagcgcgcagctgacgatcacgatgaaggctgatatcactaagcttgccactcttcaaaaacagctttcatcaactgcggaagagagatacggcacaaaactgacgatcactcattttgtctcaagagccgccgttctcgctctgcaagctcaccctgtgctgaacagcttttatcaaaatgagcgcatcatcacacatccccatgtacaccttggtatggctgtagccttggaaaacggcttagtggtgcctgtcatccgccatgctgaaaagctatcgctgattgaactggctcaatcaatctcagaaaatgccaaaaaagcacgcgagggacgtgcgggaagcgaagaactgcaaggctctaccttctccattacaaaccttggcgcgtttggagttgagcatttcacaccgatactaaatccgccggaaacaggcattctcggcatcggagcaagctatgacacgccggtgtatcaaggggaggagatcgtcagaagcacgatcctgccgctcagcctgacatttgatcacagagcgtgtgacggcgccccagccgctgcattcctgaaggcgatgaaaacatatttggaagaacccgcagcattaattttataggaaaagcaggtgaaaacgacatgacattagccattatcggcggcggacctgcaggctatgcggctgcggtctccgcggcacagcagggcagaaacgtgctgctcattgacaaaggcaagcttggggggacctgcctgaatgaaggctgcatcccgacaaagtctttgttagaaagcgcaaacgttcttgataaaatcaagcatgccgacagctttgggatcgaacttccggcaggtgcgatatcagtcgattggagtaaaatgcaaagccgaaaacaacaggttgtcagtcagcttgtccaaggcgtacagtacctaatgaagaaaaatcaaatacaggttgtaaagggaacagcctcctttctttctgaaagaaagctcttaatcgaaggagaaaacggaaaagaaatcagagaggcggaccaagtattgattgcctccggatcagagccaatcgagctgcctttcgctccgtttgacggcgaatggatcatcgacagcaaagacgcgctttctctttccgagattccgtcttcactagtcattgtcggcggcggtgtcatcgggtgtgagtatgcagggctgttcgccagattgggatcgaaggtgaccatcattgaaacagcggaccagctgattccggctgaagatgaagatattgcccgtctctttcaggagaaacttgaggaagacggtgtcgaagtgcatacttcatccagattagagcgggtggatcaaacggccaaaacggcaatatggaaaagcggtcagcgagagtttaaaacgaaggccgattatgtgctggtggcgatcggcagaaaaccccgtcttgacggattacagctggaacaggctggagttgatttttctccaaagggcattccggtgaatgggcacatgcagacgaacgtgcctcatatttacgcgtgcggagatgctatagggggcattcagctggcgcatgccgctttccatgagggcatcatcgctgcttctcatgcttccggaagggatgtcaaaatcaatgagaaacatgtgccgcgctgcatctatacgtccccagaaatcgcgtgtatcggaatgacagaacgacaggcaagaagcatttacggcgatgtgaaaattggcgaattttctttttccgcaaacggcaaggcgctcattaaacagcaagcggaaggaaaggtcaaaatcatggctgaaccggaattcggcgaaatcgtgggtgtctcgatgattggcccggatgtaaccgagctcatcggccaagcggcagcgatcatgaatggtgagatgacggcagatatggcggagcattttatcgccgcccatccgactttatcggaaacattgcatgaggcgctgttaagcacgatcggccttgcggtacatgcataataaaggaaaaagcaggcgcatggatataaggcgcctgcttttttattgttgaaagcgctttatttttcccctacaatagatgaaaacggcgtgtaagggaggagcgatcaaggaaatgaattcggtcccaaacgatttgcaaacctggaaacgttttgtgaaagacggtgtgcttgacgaagcccgattaagaaaacggattgcagagtcatggcatcgctgcaaaaaagctgaggtcaatccttatttagaaaaaggcccgaaggttttacagcaaacggagctggatcagcagtcaaaaaaacattcattcttcttgacgaccgcaaagccttacctcgaaaaactgctgcctgccataaaagaaatggaaatgatggcgctgctaattgattcagacggtgttgttctggcattggacggccatccccgcgcgctctatgaagccaaacgcatcaactttgtcgaaggggcatgctggacggaaacggctgtcggaacaaatgcgattggcacggcgctccacatcagcgagccggttgcgatacaaggatcagagcattactccattgcttcccatctttggaactgttcagccgctccgattcaccatgaggatggcagccttgcgggtgtgattgacatatcgtgtccggcggcaggcgctcatcctcatatgctcggtattgcctctgcgatcgcctatgcagctgaacgggaactcgcagctaaaagccgtgagaaagagctcgagctgatcagccgttttggagagagggctgcatccagtgtgccgatggtgctatgcaataacaagcagcacatcatcagtgcgagcataccgattcgaacctcaatgcctgattggcagggccggcacctgtatgagttgaaagaacggggctactcaatcgaaaaagctgtcaccataggagatggcggcacttgtttttatctttcggaacaaaagaaaaagaaggtgttccgattcaatggagtgatcgggaaaagcggccgatcgcaagcgatgctgatgaaccttgaacgtgcagctgcggcagatgcaacggtctgtttgtcgggcgaaactggtacgggaaaggaagtcgcggctcgcgctcttcatgagaacagtgagagacgtcacggtccgtttgttgctgtcaattgcggagcgattccgtctgatttgattgagagcgaactgttcggctatgcagagggcgcttttacgggagcgaaacgaaatggctataaaggcgcctttcaaaaagcaaatcaaggcacattatttttagatgaaatcggagaaatttcccactcgatgcaggttgcacttttacgggtgcttcaggaacgcaagataacgccaatcggcgggacgaaagaaattccggttgatatcagagttattgccgccacacattgtgatttacgcgagcttgccgaaaacggaaaaatcagagaggacttgttttaccgtcttcatgtctatccaattgaactgcctccattacgcgatcgcaccgaggatatcccggacctctttgagtactacaaacagaagaatcattggccaggcgaacttccttctgatttttgtcatgtgctgaagcaatggaagtggccgggaaatatccgtgagctatttaatgtgtttgaacgtctttccatcagatttccggaaggcgggcttggggatgagccgctttccgctttactggaagccgctggactgccggtcagcactgcagaaaaacagcccgctgctgccggcgtgctcaaacttcgtgagcaaatccaaaaggatatgatgatcaaagcgcttgaatctgcaaaaggaaacgtctctcaagctgccaaaatcagcgggattccccgaagcactttctacaaacgcctgaaaaaattcaacttgtccgctgaatcgtaaagcatacttccttcaggaaatggaaacgttatgtattgaaggagggtgttacgatgaatattcaaagggcgaaagtaatagtagaatctcccgatatgaaaaaagtaacatataacggcgttcctatatacattcagcacgtgaatgaagaaaacggaacagcaagaatttatccgcttgacgaaccgcagcaggagcatgaagtgcagctgaacagcttaaaagaggattaaacaaaaatggcccgcttcataagcaggccattttgttatccgcgcggcgcaaataaaataacacagacaccgatgagacaaatgaatgcgccgatccagtcatacagatcaggtgttttccggtcaacaagccatccccacaggaccgcaagcacgataaatactccgccataagcggcgtatacacggccgaaagatgggaaggactgaaacgtcggaagaatgccgtatacaatgaggatcagcgccccggcgattccatagccggctggctttgcctctctcagccatagccaaaccagatatccgccgccaatttcggcaagccctgccgcgagaaataaaagaatggtaatcagcatcatgagcactcctcaatttgcatttatctttcattatagaggaggagagcttttaaagcttcggatgattctcaaattccttcaaatacgcttttcgctgaacctctgtaaattggctgatccaattgttttgagcctcttcattcaaatggggaaggacatagcgttcaatcgcttcgaaaaacagcggattcgcgatgatgttccaggtcgggatgcgaacgattttcccgtctgttttctcgatgataatatcctcaaaaaagatccctttcagactgtattggtgacgtcccatataaagccgcttcacctcggaaaacagcacgctgcgctttctcgagaagatctcgccactaggtccggtctttatgctgaaaatgacatttccacggcttgtgaacgcaggaaaagccataaagaatgtgatcaatccataaattatcgccagtaatccgccgcccaaataaagcagggcatatttagattcaaacgtgagggcttcagacaccagccagactcccacaataaaggcgccccctgtagcgaggaacagccaagcctttagaaacatcatgctttttacttcaatcatgtgctgcccctaaagcttcggatgattctcaaattcctttaaatacgcactgcgttggatgtctgtaaactgtccgatccaattgcttttcgcctcttcattcagatggggaaggatatagcgttcaaccgcttcgaaaaacaacggattcggaatgatgttccaagtgggaatgcgaatggtcttctgatcaacggtttggatcaatatatcttcttggaagattccttttagactaaatttatggcggctcatctcaattttcttgatatcagtaaacgtaacagacactttgtcagtgaacacttctccattttttcctgtcttgatgcggaaaatggtatttccccgcggggtgaaagccggaaagaagatgataaataaatataaacaaaacaaagtgaacagaaagccagcaggaatggctaataggtaatatttcgtttgaaacgtaatacccatataaaagagccacaaacatgctaatcccataccggcagatccgacaaaagcccatattctcaggaacattttgcttttgacttcaatgatttcttggtttttcaatgcttttctccttttgttaattcaattcttatcattgtgaaatgatttgatttacaacatccttatgagcagggaggatagaaaattcattctgggtgatgcctgtgacaagccaagtatggtgggcccccggcaggacaaatgccatgtcagccacttcaggagtgttatctttgccatatgccagacgcataagtgtatccattttccctttccgcaaagccaaatcatttgtaaatcgggtaacgtcctcttggtggtcatgtttttcaaggaactcttttagatatgaagggttgtctgaagcgccctccaagagtttttcaaattcatttgatgtcaatgtcacaatcgattctcttttatcctctgtatctattatatgtaaaaactcatctgtcttagcaagtaacccttcacttgattccatttttgtaatgcgatggacttgttcatcaaaaaggagttcgtgagagtaggtgccgaattttgatacatggcaggacacattctgttcggcgccttgcccgttaaatttagaaagcttcactgtatagtcagcgtcgtttaatacatggataaacggacagtactcgtcctttaaccgatattgatggttccgatattccgctgcatccttagctaagagtgagcggcaagctgcttcgaacaaagcgccgagctgttcatcttctatttccggaaaataggcctgcttcaaggccatcccctgttcaaaaaacccttcgctgtaaaagcaaaataagagttcttctatgctaattgtaaactgcttcattgtttattctcctatccaaatgaaaatttccctttaaggaaatgggttgcgccgtgtataagcgaatccgctgttttctttgctttttccattccttttttcgcgctgtctatccctttatgtatcgatttattcgccgcatctatgccgtcattcactgatttgacgactttgccggctgattccagcccttttttggctgtatcaacaacagcatggatcggttctttcagctttaaggctgctttttcagcaaaaccggctgtatatttggcgatttgttctccgacgactccgccaatgtatgaacctgctgccccaagaaggacagtacccacaggtcctgcaaagcttccgattgcaccgccgatgacagcaccagctgtggcaccgccggcaacaaaaatcgtattattcacagcattcccgacggccttggcgttttcacgcttgagaacttccggtttatcctggtattttgcataattttcagcaattttcacgcctgctccgaatgtttcggtcgctccggtaatcagtgtggcggtaatggcatttcctttcgcgaatctcaagcccgtttttcccacatccttcaaagtggagcgtacgccggcttcattaagaaatccttttgtgtagcttctgacgctgtttgaaaaatccaccgtgtcctgaggaaagtattttgtaaactttttatgtaccaaatctgaaaatggacggtttgtctttttcaacaaatatttaggattcaaaagcactcttgccgctttttgataacgtgagctgtcaacggccctggaaatatccaagagcagttttgagtgctgggctgtatgcaagccgcttggttgtttcacaaatttcgtaagccctaatccgtaatattttccctgcgtcagcataagagcggttaagcttgtcatcgtaccgtatttgtcgtaggcattgtagagctttcgcaaaaaatcatcttgttccacaaatttatcgcctgtttttctgatgaaaatctcattgtcactcagcttagtgacgagcgcctttcctgagctccacgcatcgcccactccagaaaaacagctgctgtagcggggatcgcattgcaaaatcatctgccccagctccacatgcaggtccttatatttgttttccatatcagttaattcagtgacaacatcatttgcaagctgttcgagcttatccggatcaactgcaatgtttcctgacacaccgttcacctcccgagtttatgtctttcctctcttgctttacgctccagttcttccattctggcaatttcagcttttcgttcttctattttgacagcggtagccttcagctcttggcttgtttcaagcagctcctgttcgaattgatcgtaggcggctttcgtttcctcgaaatcctggtcaaacgaatctcttgatttgccctgccaagcatctcccaatgcagataaccgggattcaagcagcattttggagcttctgacctcttctgcggccgcactgtacttgtttgccagctcaatgactttatatgagtccaacttttgtcccctgccttttctaaattcacgcacaattggatgttttatataaatgattataaataattcggcatgtatccgaatcgtacaaaagaaccttttcataagaattggaagggcgtatattcacttaaaattcacagttggtgagactttaagattacaaaaaaggtaaaaaaaacaaatccctcagacataaggcaaatgagaaatttcccgctctatgggaaaaaacactaaagttgatcaaatgacctaagtgcgccaaacgtgttacgggacgggctatctcatggtataaatggaattgtaaacgttatcaaggaggtcgtcatatgaagaaaaaatcattctcaatcgtaatagcgggcggagggagcactttcactccagggatcgtactcatgctcttggaccatttggaggagtttccgatcagaaagctgaagctgtatgataatgataaggagagacaggatcgaattgcaggcgcctgtgacgtttttatcagagaaaaagcgccggatattgaatttgcagcgacgactgacccggaagaagcttttacagatgtcgattttgttatggcgcacatcagagtagggaaatacgcgatgcgtgcgcttgatgagcaaattccgttaaagtacggagttgtcggccaggagacgtgcgggccgggcgggatcgcatacggtatgcgttcgatcggcggtgtgcttgaaatattagattacatggaaaaatactcgcctgacgcgtggatgctcaattattccaatccggcggcaattgtggctgaagctacgagacgccttagaccgaattctaaaattctcaatatctgtgatatgccggttgggatcgaagaccggatggcgcaaattcttggcttatcctcaagaaaagaaatgaaggtccgctattacggattaaatcacttcggctggtggacatcaattcaggatcaagagggcaacgatttaatgccgaagctgaaggagcatgtatctcaatacggctatattccgaaaacagaggctgaagcggtggaagcgagctggaatgacacattcgccaaagcgcgtgacgtgcaggccgcagatcctgatacactgccgaatacgtatttgcaatattatttgttcccggatgatatggtgaaaaaatcaaatccgaatcatacgcgggcaaatgaagtgatggaagggcgcgaagcttttattttcagccaatgtgacatgattacacgtgagcagtccacagaaaacagcgaaatcaaaatcgatgaccacgcatcatatatcgttgatcttgcccgggcgattgcctacaacacaggtgaaagaatgctgttgatcgttgaaaataacggcgcaattgcgaactttgacccgactgcgatggtcgaggttccatgcattgtcggctcaaatgggcctgaaccgattaccgtcggcaccattccgcaattccaaaaagggcttatggagcagcaggtatccgttgagaagctgactgttgaagcgtgggcggagaaatcgttccaaaagctgtggcaggcgctaatcctgtcaaaaacagtgccgaacgcgcgtgtggcaagactcattctcgaggatttaatggaggccaacaaaggcttctggcctgagcttgatcaaagcccgacccgtatatcataactgaaattcccccattttcgaatctgtaattgtatataatagaaagaaaatggggggatctgatatgcagctcgaagaactgatcaatcagcactacagcaaattgaatgacaacgattttcatattttaaaatatatattgaatcataagcacacatgctatcaccttggaatcgacgcgctggccaaagcttgcagtgtatcgcgttcctcaattttacggcttgcccaaaagctcggtttcagcggttacagtgaatttcgcgtctttttaaagtgggaagatcagccggaagaaggcgagagtatgagttttcaaaagctgcttgatgatattgaagcaaatttgaagttcttacggacaaaggacatgacggacatgtgccagctgattgatgcagctgaccgcattttcgtctacggttctggaaatgcgcaaaagatatgcgcccgcgacctgcaaagaatgtttattccgcgccatcgctatcttattttaattgaagacacaaatgaatttaatttgatgcgcgatgattttaaagtaaacgatctgtttatcatcatttctctttccggagaaacaccggagctgattcctcaggcaagaatgctttctgcaaagggtattccctttatttccattacgaatttaaaaaacaatgtcctcgcccagctgactccgcataatctttatgcgacaagcaaacctgtgacattaagcgataaaacggaaattgtcgcttttgcaccgttttttctcgttggcgaagcattgttccgcgcatatgttgattacaaagaggcagaaaaaaatgacaatgagtagcagggggttctggtatgatgcaaaaaattcagcgctttggaagcgcgatgtttgtgcctgttttattattcgcgttcgccggcattatcgtcggtatcagcacgctctttaaaaataaaaccctcatgggaccgctcgccgatcctgacggtttttggtatcagtgctggtatatcattgagcagggcggctggactgtttttaaccaaatgccgctcttattcgccattggcatcccggttgctttggcgaagaaagctcaggcacgcgcttgtttggaagcgcttactgtctacctgacattcaactattttgtcagcgcgatattgacggtatggggaggagcatttggcgtcgacatgaatcaagaggtcggcggaacgagcgggttaacgatgattgcgggcataaaaacgctcgataccaacatcatcggagccatctttatttcttcgattgtcgtctttttgcataatcgctattttgataaaaaactgcccgattttctcggcatctttcaaggctcaacatatatcgtgatgatttccttctttattatgatcccaattgccttggctgtgtcttatatttggccgatggttcaatcgggaatcggctcgcttcaaagcttcctggttgcttctggggcggtgggcgtttggatatacacgtttttggaacggattttaattccgaccggccttcatcactttatttacacgccgtttatttatggcccggctgtagcagaaggcgggatcgtcacgtattgggcacagcatcttggcgaatattcgcaaagcgccaaaccgctgaaggagctctttccgcaaggcggattcgcgcttcacggcaactcgaaaatcttcggtattccgggtatcgccctggctttttatgtaacagccaaaaaggaaaagaaaaaactcgtcgcagggctgctgattcctgtcacactgacagcgattgtcgccggtattacagagccgattgagtttacgttcttattcatttcacctttcttatttgcggttcacgccgtgcttgccgccacaatgtcgacagttatgtatatggccggcgtcgtcggaaatatgggaggcggactgattgaggcggtaaccttgaactggattccgctctttggcagccacggtatgacatatgtgtatcaaattttgatcgggctctcgtttacagcaatttattttttcgtcttcagatttttaatcctcaaattcaatatcgctacaccaggacgggaaaaggatgaacagcaggaaacaaagctatattcgaaaaaggaatacagagaacgaaaaaacaaggatgaaacggcctccgctgctgaaacggctgatgacaccgcttttctgtatattgaagcgctgggcggaaaagacaacatcactgaagtcacaaactgcgccacccgcctcagagtcagtgtcaaggacgaaacaaaggttgaacccgacagcgtattccgcgcgcttggcgcacacggcgttgtcaggaacgggaaggcgtttcaggtaattatcggattaagcgtaccgcagatgcgggagcgtgtggaaaaaatattgaatcaataaagactgccctccttttcgggagggttttcgtttgccgtcaaaaagaccgccatagtaaagtaaagaaagagacaatcgagtaaaaaggggtttggaggcttttacatgcaaaaggctttgtcgtttttaaaaccatattcattgctggcgggaattgcgctgattcttatgttgacggagcttgcagttgaactgatgcagcctttattgattgcaaaaatcatcgacgatgggatattgaagcaagatctgcggcatgtatggatatggggcgcggtcatgatcgggctgaccgtgttatcctttgcggcggggatgctgaattccttttatgccgcccatgtcagccaaagcttttcctatgatacgagaaaagggctttttcaaaaaatccagtccttctcctattccacatttggacagttttcgtcctcttcttatattacaaggctgacaaacgacgtcacacaggttcaaaatatgatttttatgagtttgcggtttatgctgcgggctcccttaatgattgcaggcggcattgtgctgtcgcttgccgttaatgtgaaactcggcttttttctgcttgtgaccattccgatcctgatcttgtttttgctgtgggtattaaggaaaggcggggcgctgttccgctcagtgcagaaaaggctggatcaagtgaacaccatcatgcaggaaaatttaatcgcaatcaagctgatcaaagcgctgcttcgcggcagccacgaagtcaaacgatttatcaaagccaacacaaggctgatggaaaaaacggtttcggcctttcagcttgtggaattcacgatgcctgtactgatgctgctgatgaatctctgcattcttttgattttgtgggcggggtcctacagtatcacgagcggaagcactcaggtcggcgatgttgttgcgataattaactacgcaacacgaattacaggcgcgctttcgatgtttccgtttttgattatgattttcaccagggcgaaggcttcaggggatagaatcggcgaggtgcttgaaacagaaggcgatgagcgggaggaaggcatcatatctgatcgtttgtcaggacggattgagtttcagcatgtatcctttcgctatcctgaaatggacagagaagcgctcaggaatgtctcattttccgcaaagccaagagaaacgatcgcgattctcggtgcgacgggctcgggcaagtccacgctttttcagctcattccgcggctttatcagccggattcaggctgcatttacatagatgaaaagccggttcaagattttccggctgaagggctgcgcaggcaaattggatatgtaccgcaggaagtcctcttgttttccggcacaatcaaagaaaacatcgcttggggcaaagaaaatgcttcactagatgaaataatggatgcggccaaacatgcgcaaattcatgaaacgattttgaagctcccaaatggatatgatacagttttggggcaaagaggcgtcaacctgtccggcggccaaaagcagcgaatttccattgcgcgggcgctgattcgaaaaccggctatccttcttttagatgacagcacaagcgcgcttgacctgcaaacggaggcgaagctgcttgaagcaatcagcacataccattgcacaactttgatcattacacaaaaaatgaccacggcgatgaaagctgatcagattttgttgcttgaggacggcgaactgattgaaaaaggcactcacagtgagctgctttctgaatctcaattatacaagcgcatttacgagtcacaattcggaagggaggggagcgagtcatgctaaaagacatccgcaagcctttccaatatcccaaactgccaattgacaaaaaagaaggcgcgaaaaagcgggcgaaagcaaaggatacaaagggcacactgagacgaatctggtcttacttggctgaacgaaaaggactgctcatacttgtcatgctgatggttgtcatcagcgccatattcgggctccttggcccctttgtgatcggaaaggccatcgaccattttatcgtcgggaaaacggtcagcggcttgattcctgttttgcttcttctgctcgctatctatatcattcagtccctgtcgctttggtttcaaaactattggatgattacgatctcgcagggcacggttttcagaatgagaagcgaattgttcacccatctgcatgagctgccgattccattttttgataaacagcggcacggcgagctgatgagccgggtgacgaatgacatcgaaaatgtcagttctaccttaaacacgtcagtcattcaaattttgtcaagcgtgatcacctttgtcggaacaattgcggtgatgctgtacatgagcccgctccttacattgattacgctgaccattattccggtgatggcagcgagcctgaaatggatcaccaaccgaacgggaaagctgtttaaagaacagcagaaaaaccttggtgatctgaatgggtatattgaggaatctgtttcaggcgcaaaggtcatcaaagcatattcacgtgagaagcagattactgctgaatttctcgaaaaaaacgctgcactcaagacgtcgggcttttgggcgcagacgatttccgggtttatcccgaaggtcatgaactctttgaataacttaagctttacaatgatagcggcaatcggcggtttgtttgcgctgaaaggctggatctcgatcggctccatcgtcgtctttgccgagtattcaagacaatttacacgccctttaaacgatctggccaaccagtttaatacgatgctgtccgcaatcgccggcgctgaacgggtgtttgacgtgcttgatgaaaaagaagagcgcgaggatgaaaagaacgccgtgcatcagcccatccaaacaggcagcattgaattccgggatgtgtccttcggttacgataaagggcagcagacactgaagcatttacagtttaccgtgcctgcggggcagtccatcgcgtttgtcggaccgacgggggcggggaagacaaccgtcactaatcttctcgcccgtttttacgagcctaacgaaggaaaaattttaatcgacggtacagatattaaaacccttactagagcaagcctgagaaaaaacatggggtttgttcttcaggattctttcttatttcagggaacgatcagagaaaacattcgctacggcaggctcgatgcttctgatcaggaagtcgaagccgctgcaaaaacagcgaatgcccatagctttattgaaaggctgccaaaagggtatgacaccgtgctgacgcaaaacggttcgggcatcagtcaaggacagaagcagttgatttctatagcgagggcggtgcttgctgatccggttcttctcattttggatgaagcgacaagcaacattgataccgttacagaagtcaacattcaagaagcgctcgcccgtttaatggaaggaagaacaagcgtcatcattgcccacaggctgaacaccattcaaagagcggaccagattgtggtgctaaaagacggtgaaatgattgaaaaaggcagccatgatgagctgattcggcaaaaaggattttacagtgacttatatgaaagccaatttgagaaatagacctttgtcctgcacagaggtcttttttgttacagttttatagtacttttatttcattttcgtaaaatgtaacaaaattacttgacgtaaacaagttatgtatatatactagcttacattaagtaagtgataacatttatcaaggaggataaaatgaataaatcatttgaaattggcacattacttttaagagttattacaggtattatcttttttgttcacggtttatcaaagtttcagggaatggagggcaccatccaatttttcggcagcataggccttccaagctttatggcgtatgtcatcgcagcgattgaactcattggcggagtgcttgtcttcttcggattggctacacgtattgtcggtgtactgttcgctcttacactgatcggcgccatcatcactgttaagctgaaagcgccattcatgggcaatgcagaatttgattaccttctgcttttgacatccattcacctggcgcttactggaagtcgattcctggcgctggacccatttgtgtttaaaggaaaaaagaacgaaaacgtttcagcataagaaaagaggcatgcagcatgaccagcattcatgaggatacacacattggctatgccaaactcacaattcgcagtctggagcgttcgcttcagttctactgtaacgtcatcggttttcaagtcttaaaaaagacggatcgccaagcggaattaacggctgacgggaaacgcgtactgcttattcttgaagaaaatccgagcgctgtcgtcttgcctgaacggtctgtgacaggcctttatcactttgcgattcttcttccggacaggaaagaacttgggatcgcgctcgcccgcctgattgaacacggcattgctatcggacatggagaccatgctgtcagcgaagcgctctacctgtctgatcctgacggaaacggcattgaaatgtacgctgaccgcccccgcagcacgtggcagcgtgatcgggaaggaaactacgtcatgacgacaaccgctgttgacattgagggccttctggaagaggcaggagatgagcggaaaacatcgcttccgaacgatacaatcatcggacacattcatctgcatgtcagtgatttgaaagaagcaaaggcgttttatacagatgtactgggctttgacattgtcggaaactatgcgggcatgtccgccctcttcgtttcagccggggggtaccaccatcatatcggcttaaacatttgggcgggaagaaatgcgccgcctaaaccgacaaatgccagcggactagattattatactgttgtcctgccccaccaagaggagctggatttggtggcaaaccgagtcaaacatgccgggtattcgattgaagagacggaaaacagctttcgtgtgaaagaccctgtttccggcgcctatattacatttgtgatttaactgcaatccccttgccgaaataacggcagggggattttttatttttgtccgccttgttatgatgagagaaccaacttgttaggaggcgtttacatggaactcaaccaccttgtgacgggcaaaatagcattaaatcaatatgtgcatcgcttagagcaaaaggatgtttcattttacgtccactactggggagcgatgacgaaccactataacacactgcttcataagcattccttttatgaaatttgttacgtggtaagaggtgaaggatattaccttgaaggcgatcgtacatatccgcttcgtgaacagacgatttttttgtcaaagccggagcatttgcaccaaatcaaaagtgaaacagggctgttccttttttacgtcgctttcgagctgagcgaggatcagtcaagcgccgaatggatcaaagtgatggaagaagtgaaacaaagcccctttatcacaatgcaattgaaagatggcgaaccgccgggcctgctttggaaaacgttaatgctgcaagcagcgcaacctgtcaatgcttttgacaaagagatcctatctcatttgtcgcatgcattgatcctgtcattaatccaaacctttctcccgtacgcccaacgcccgaaacaaaagcagcccattcacacatcttctgctttgctgacagaggtgaaactgcacataaaagacaatctgtcacagccgttaaagctgacggatgtcgctagccactttcatatctcagggaggcatttatcacgtttatttgcagcagaactgggcgtcagctactcagaatttgtccaaaatgaaaaaataaacaaagctgccgaactgctgaaatcaacgaatttgtcgattaaagaaatagcggaagaaatcggtttctcagtacattatttcactcgcgtcttttccgctaaaatcggcagctctccagggcttttccgctccctttataaagactcaaaaatgaccgcatttcaaatcaataaaccttttcaaaaaatcgaacaggccaagccgcacgaataagatgtcctgaaatgacaaaacaatgtcttcatatgataaagacgcgagaaatctcgttgtcttataatctttttagaaagcggttacaacaaggggtattgctgaaggagggatgcattggcttatgcttggtgtcgggtgctctgccattcttgaaagaaggggaagaaagccgtgagtacaaaaaagaaagaggctgtaataggaaaagaaagcttagctcataaagggcttttacgaacgattacattggtatctacattcggcggcctgttgttcggttatgatacgggtgtcattaatggagcacttccttttatggcaactgcaggtcagctgaatcttacacctgttacagaaggactggttgcgagttccctgcttctcggggcagccttcggggcgatgtttggaggacgtctgtccgatcggcacggccgccgaaaaacgatcctttatttagccttactcttcatcgcagccacacttggctgtaccttttcaccaaacgcgtccgtgatgattgcctttcgttttctgcttggactggcggttggctgcgcttctgtaacggttccaacctttttagcggaaatttcgccggcagaacgcaggggacgaatcgtgacacaaaatgaactgatgatcgtaattggccagcttctggcatacacctttaacgccattattggcagcacaatgggggagagcgcaaatgtatggcggtatatgctggtcatcgcgacacttccggctgttgtgttatggttcggaatgctcatcgtgcctgaaagcccgcgctggctggcagctaaaggcagaatgggtgacgccctgcgggtgcttcggcaaatccgtgaagacagtcaggcacagcaggaaataaaagaaatcaaacatgcgattgagggcacagcaaaaaaggccggctttcatgattttcaagagccgtggataaggcgcattctattcattgggattggaatcgccatcgtacagcaaattaccggtgtcaattcgattatgtactatgggacagaaattctgagagaagccggttttcaaacagaagctgcattaatcggcaatattgcaaacggtgttatttcagttattgcggtcatttttgggatatggcttctcggcaaagtccgtcgccggcccatgctgatcatcggacagattggcacgatgacagcccttctgctgatcgggattttatccattgtccttgaaggaacacccgccctgccgtatgttgtgctgagtttgaccattttgtttcttgcgtttcagcagactgccatttctacggtgacgtggctgatgctctcggaaatctttcctatgcatgtgcgggggcttggcatggggatcagcaccttctgcttgtggacagctaactttctcattggattcacctttcccattttgctcaatcatattgggatgtcggcgacattttttatctttgtcgctatgaatatcctagcgattctatttgtgaaaaaatatgtgcctgagacaaaagggcggtcacttgaacagcttgagcattcctttcgccagtatggccgccgcgctgatcaggaaatccaaaatcaaacaactcacttatcgtaacctgagataccaggaggaatctatcaatgaaactatcttatgtaacagacagcctagggcatttgccttttgaagacatgctcaattttgccgcaaagcttgggatcgatacacttgaaatgacaaccgggggctggtcgccggcacctcacttgaatcttgatgaattgctgcaaagcagcgaaaaaagaaaagaattttcacaagcgctggaaaagcggaacatgacactttgcgcattaaactgctcggggaaccctttagatccgggtgaattgggcaaatcgcacagagacataactgacaaaacgatggagctggctggattattaggcgtcaaaaaagtgatcatgatgagcggtttgccagccggcggcccggacgacaaagtgccgaactggatcacatacacagtaagctggcctcccgttttaaaagatatcctcaactatcaatgggaagacgttgcgatcccatattggaagaagcttgtcaaaaaagcggaggcctgcggcgtggggaaaatagcgcttgagaacttcagctctcaattagtctataatcctgagactctctttcggctcagaaatgcagtcggcccgatggtcggtttgaatcttgacccgagccatttgttatggatgggcgcagacccgatcatcgcagcaagggagctcggctcagccattcaccatgtccatgggaaagatgtcagaattgaaagatatttatcggcggtcaacggacttttagaaacaaaagaagtgacagatcctgcaaaccgggcgtggaattacgtagctgtcggctgtggacaggatttacagtggtggaaggaatttttttcagttgtaaaaatgatgggatatgaaggtgaggtttctttagaaatggaggatctgacgatgtcacctgaagcgggcatccgtacttctgtagaagctttaaaacaaaccatcagccaataggaggttttcatgatgctaaatggagaaagaatcatctctaagccgcttcgctgggcaatggtaggcggcgggcggctcagccaggttggatataaacatcgtattggagcgctgagagacaatactgcttttcaattaactgctggcgcttttgatatcgatgccgaaagaggaaaagatttcggggtgaaccttggagtggatgcggaacgctgttatcccaactatcaaaccatgtttgccgaagaagcgaaaagacaggatggcatagaggtagtatcgattgccactccgaacggcactcattatgagatttgtaaggcggcgcttgaagcaggagtgcatgtcatctgtgaaaaaccgctgttcttcacttcagcagaggggcaggaaatcaaagcgctcgcagagaaaaaagggaaaattgtcggcgtgacgtacggtttttcaggcaatcaaatgcttcttcaaatgcgtgcgatgattgaacaaggaatgatcggcgatattcgcgtggttgacttgcagtacacacacggtttttgtgcaacagatgaaggtgaaaagataagcgctgcacagaaatggcgtgtcgaccctgcgatcgccgggccaagctttgtgctgggcgatttatctacccacacgtattatatgtcacagcttattatgccaaagatgaaaattaaggagctgctgtgtgaccgacagagcttcgtcggcagccgcgcaccgctagaggataatgcccatgtgctgatgcattatgaaaatggagcggtcggaacgatgtggacatcgtcaatcaatgccggatgtatggatggccatagaatccggattgtcggctcaaaggcaagcattgagtggtgggacagcaagccaaatgaactgacgtatgaagtgcagggagagccgggccagacactcgttcgcggcatgccgtatttagatgatgtttgcaacgccgatgaacgactgggcgccttacacagcgaagggctgtccgaagcatgggccaatatttatcttaaatttgccattgcgatagacgccaaaaaccgtgaagatgaagaaatcttgaacaacttggtttatcctgacattgatgcagggatcgagggcattcgctggattgagaactgcgtgcgctcggcaaaccaagggtcagtttgggttgaatttaaataaatgagggaatgcgccgcatatgacataaagttcatatgcggtttttattttccagaaactcctgtcaaaaatgccctgaggcaggtatgataagaagggaattgggtatcgggagtgatgagcgtgaaagctcttttttttacgagaatgttcaccttgatggtgagctgtttaatgtatctgtccattgtgaaagaggataactggtttggatatgtatttatagcagcaggtgctgccatgtatgcagccaatcatgttttgctgacaaaagagacaaatgccatctggttctgcctgattgatattgcaatcggcttttcgttcggatttatctttcccggcacaggtttgttcattattatgctttgtccggttgcggtcgccttttttctgcgggggtttcctaaaagaacagcatggtctgtcttatgtctttcctctattttatttttgaccgtcctcatccgtacatatgcgatgttcggcaatgaatttgtcattgatcatttgactagcatgacattcgttgtcttctgcggtgtcgtgggcaaattaatccgcaagctgttggatgcgcaggatacggcaaaacagcagtttcaggaactgacggagtcccatctggcgctgtctgctgcacatcaggagctccatttatatgcgaagcaggttgaagagctgactgccatttacgagcggaacagaatggcgcgtgaaatccatgatacagtggggcataaaatgacggcccttctcgtccagctgcagcttttgcgtgaatggcaaaaaagagacagccaaaaagcggatgagacagtaggtgtctgtgaaacacttgcccgtgaagcgcttgatgatgtccgcttatcagtacgcactctgcaaactgaaaacgatccttcgctaatcgaatcgctgaaacagctgacagaggacttttgcaaaaatgcaggagtcacaacagaatttgcggtcagcggtgatcctgcaatcatcccgctgtctctccatccgaccctgatcagaacggtgcaggaagcactgaccaatgccaaacggcacggcggcgccgcagcctgttcgatacagcttgcctgcacaacggacagcatcagccttgtcattaaggatgacggcaaaggcaatcctgaggcagcacttggttttggtctcttgaatatgaaaaagcgggcagcggagcatggcggaatgatccgctttgaaagcgaacgggatcaaggatttactgtaaatgcagaattttcacttgccaataaaaaatggagcttcgggcccgtgcagcaaaaggagagtttatcatgattaagatcatcattaccgacgatcaggatatcgtcagagaagggctggcatccctgctccagctccgagaagagctcgatgtgatcgcaacggcgcgaaacggacaggaagccttcgaaaaggcgaaagagctggagccggatatcgtgttaatggacatccgcatgccggtttccaacggggtggagggaacaaaattaatcacaagctcgctgccaagcgtaaaggttttgatgctgacaacctttaaggattcagcgctgattgctgaagcgcttgaagagggagcaagcgggtatctgctgaaggatatgtctgcagatacgattgtaaaagcagtgatgactgttcattctggcggaatggtgcttccgccggaattgactgcccaaatgctgaatgaatggaagcgtgaaaaacagctgaaaggaataaatgagatagaaaaacctaacgagctgctcgacctgaccgagcgcgaaatcgaagttctggctgagctgggatacgggctgaataacaaagaaattgccgaaaagctttacattacagaaggcacagtcaaaaaccacgtttcaaatattatcagcaagctggctgtcagggacagaacccaagccgccatttactcggtcagatatggtgtatctgtcttttgacatatgacgttttgcatatacgcttctctgaaaaggccttttacaggcctttttttcatgccctatgttctatctgccgctacatgccgcacgcctttctttcttctacaatggcaatggatcaaaaaaaggagtgagacgacgtgctgcaagcagaaaacatcaaaaaggcatacggaaaaaaaacaatcgtgaaaggcatttctttttccctcaaaaagggggagtcgttcggtctgctcgggcctaacggtgcggggaaatccacaaccatctcgatgatttccggccttgtgccgcatgacagcgggaacatcacggtgggcggctatgttatcggaaaagaaacggccaaagcgaaacaaaaaatcggcattgttccgcaggaaattgcattatatccgacgctgacggctcatgagaatcttatgttttgggggaaaatgtacggacttacgcacggtgaggccaaaaaaagagcggctgaggtccttgaatatgtcggtctgactgagcgggctaaagataagattgaaacattttccggggggatgaaacgaagaatcaacatcggtgcggctttaatgcataagcccgagctgctgattatggatgaaccgactgtcggtattgaccctcaatcgagaaatcacattttagaaacggtcaaacagctcaacgaaacgggcatgacggtgatctatacgagtcattacatggaagaagttgagtttttatgcgaccggatcgggataattgatcagggggaaatgattgcgattggcacaaaaactgatttgtgcagccgccttgggggcgataccatcattcagctcacggtcagcgggatcaatgaagcgtttcttgtggcgatccgatctctggcccatgtgaatgatgtaacagtacatgaattagagctcaaaattgacattgctgcggctcatcatgagaaagtcgtcacaagcctgcttgctgaagccactgctcatcatataaacctgctgtctcttcaggtgcaggaaccgaatctggagcgcctgtttctgaatctgaccggccgcacgttgcgggattgaggagggacggcaatgaaaaaaagcatatggatcgcatggaaagatgtcaaaatcagaatcacggacagaaaagggtttatgatgcttatcctaatgccgctgctcctaacatgtattttaggggcggcgctcggatcagttgttgacggaggcagcgggattgatgacatcaaagtcggctacgttcaaccagatcagtcagatgcagcgaacatgtttacgaaagatgtgcttaaaaaaataaagtcaataaaggtcacaaaagccggcagcgaagacaagatgaaaaaactgattgatgaaaagaaaatcgatgtaggcatcgtcatcccgaaccattgggaagccggcaaaacctcagctgttgtttatgccgcacctgatcaaacattgaaaagttccatcatcgaaacagctgccagctcttttatagagcaatataaagcggtaaaggaagccgcgtcagcctcaatggactacatcagcaaaacggaagctgtacagcaaggaaaacttgaccctgcacagtttgcagaaaagctggcaaagacgctagaaaaagaaacaggtgacaagctgactattgcagaaaaatctgtcggcagcaaggccgttaccagctttcaatactattcggcggcaatgctttgcatgtttatgctgtttcatatgacagtcggggcgaaatcgtttttacaggaaaaggatacggagacgcttgccagaatgctgatgacgcctgcgcaaaaatccgtcattctcttcggaaaatggcttgggacgtatctgtttgctatcatacaatttttcatatttctgatcgtcacaatcaatgtatttggtgtggactggggcggtaatctgctgtttgtgagtgtactcgggctttcttacgccgcagctgtatctggtatttcaatgctgcttgcgtcgtgcatcagcgatatgaaatctgcagactcgataggcggcttcggcattcaattgcttgcggttctcggcgggtccatgctgccgctgtaccaatttccggacgtcttgcagtctgtatccaaagcggtgccaaatcgctgggcgcttgacggctttctttctttaatggaagggggaggctgggctgaccttcaaaagcctgtgcttctttttgcggcgatcggcttttgttcacttgtaattggtatcagacggcttcatacaagataaggaggtacaaaaggtgaaaaaaattctagccatttgcggcattgagctttctctcatttttaagaagccacagaactatttgatcatgtttgctgccccgcttttgcttacctttgtatttgggagtatgctcggcggcaatgatgataaggtgcggcttgcaatcgttgatcaggacgatacgattctctcacagcattatattcggcagctgaaggcacacgatgatatgtatacattcgaaaacgtgtctgaaaacaaagcgtcagaaaagctgaaacaaaagaaaattgccgggatcatcgttatttcccgctcgttccagacacagctggaaaaaggcaaaaaccctgaactgattttccgtcacggccctgaactgtcggaagcgtcgatggtcaaacaatatgcagaaagcacattggcaacgctcaatattcaggtgaccgcggcaaaaacggcatctcagacagcgggagagaactggaaggcggcgtataaaaccgttttcgccaaaaaacatgaagatacagttccggctgtaacacgacagacgctcagtgataaaaaagagggtgcggaagcaagtgacacagcctccagagcagcagggttttccatcctgtttgtcatgctgaccatgatgggagcggctggaaccattttagaagcaagaaaaaacggcgtatggtccagattgcttacagcctctgtcagccgagccgaaatcggtgctgggtatgtgctgtccttctttgtcattggctggattcaatttggaatattgcttctttccacccattggctgtttggcatcaactgggggaatccggctgcagttattgtattagtgtcactttttctattgaccgttgtcggcattggattgatgattgcggccaacgtcagaacgccagaacagcagcttgcgttcggcaacttgtttgtcatcgcaacatgtatggtgagcgggatgtattggccgatcgacattgaaccgaaatttatgcaatccatcgctgaatttcttccgcaaaagtgggcgatgagcgggttgacagagattatcgctaacggtgcccgcgtcacagatattctcggaatctgcggcattttgcttgcatttgctgcgatcactttcgcagcggggctgaaagcgctccgagcctaaaaaacatctgccgtttaggcagatgtttttttgcatgtgggtacattcgtatgggtgcagcctgaactgcggttaatccttatctatcatagctaaaattgattccagccaagaaacgtaatttttctcccgctccagcgctttcgttagcacaagatagtggccgaagtccggtgaagaaaatgacatcggctctgctgaagccataagcttttcatagcttccctgtaagtcagaaagcttggcctggcgtttttgcagctggtctttgaacaaatcagaagcctcctggcgcgatagacaagaaatgaaataagccttcagcataaattcatccttcaccgtctcgggtatcggctggtggcggatcagccagtcatgcagctcctgctttccgctgtctgtcagggtgtacatctttttctccagctttgtgccctgaatcgttgtccggaacgtgataaatccttcatccgtcagctttttgagctcagggtaaatctggctgtgcttggcgctccaaaactggccgagctcctctttaaaataactcgtaatatcgtatccactcaattcgccttttcgcaaaagccctaatatggcgtattttaatactctcatgctatcctccgtgtctggctgtttcgtaaaacagatgagccggtgctcaactgtgattctaactgcctattccccttattatagaaaagggaggaagggaacacaaccgggctctttggaaatgaaaataaaaggtttgtcagaaggtatccgatttatctccgtcaatgttataaaagagatttaaatttaattttcagaaaaaatagtaacgatattgattttttatatataataggaaattggtggtatgaacattttaagggggaataaacgtgaaaaaagtacttatggcattcattatttgtttatcgctgattctatctgttttagccgctccgccgtctggcgcaaaagctgaatcagtacataatcctgtcgttcttgttcatggaataagtggtgcatcatacaactttttcgctattaaaaactacttaatttctcaaggctggcaaagcaacaaactgtacgcaattgatttttatgataaaacaggaaacaacctaaataacggcccgcagcttgcttcatatgttgaccgtgttttaaaagagactggggcaaaaaaagtagatattgtggctcatagtatgggaggcgccaatacgctgtactatattaaatatttaggcgggggcaataagattcaaaatgtcgtaacgcttggaggggctaatggtttagtgtcatcaaccgcgctgccgggcacagaccctaatcaaaagatcctctatacatctatttacagtctcaatgatcaaattgtcatcaatagcttgtctcggttacaaggagcgcgaaacatccagctttatggcatcggtcatattggcttgctttctaatagccaagtgaacggctatatcaaagaagggctgaatggcggaggcctcaatacaaattaatatcttcaaaaaacaacctgctgtctccgttacagtgggttttttcgtctgagaaagccatagggtcttatgaccttagtctatcatgcatacgtcaatttatgacatcaggcactttttcaaatagagcggacatgttaaggtacaaccatcgatttctataaatttgaaataaaaggagcgctgttatgcaaattaaagaaatttttatgatccgctgcatttcgtgcttaagtgtcgtcttgctccatatcatttcaatggtcctgatgcttcaggcagaagctcttgcagatatttctcacactgttgattctttccgcacactcctgatgttcagcacgcccgcttttattttcatctctgaatttttactggcccgttcttatcctgatggggtgcctgacggttttttaaagaagcggggaaaagtgatttttgttccttttctatttatcgcggccatcgatgcgctgctgatgaccagtgcgatggggggagaggtaacctttctcgcgtttgtgcaaaaatatctggagaacgtattcttaggaaactttatcggatacttcattctcgtcatctttcaattttacatgctgcatatgatgtttcatgagtatttgaaaaaagcatcgccgaaatgggtgctgtctatctcatttgtggtgacagccgcttatttaggctatttctcagcagccagcccggctcctgcttctgaagagggcggggcatttccgttcttctgggttccgttcgcaggctggcttttctacttttgtctagcctactattgcggaaaagaatacaagcgttttttagcgctgctgaaccaataccgctgggtggtgtacggcgccgcaattgcttctggggcgctggttgtcactgtttcttatgtgggtgaaatcggcatgatcagctcgaagcggcctgatatcatgctgtattcaacaagcatgatttttctgtgttttcacttgttctccaaaatgaagcatgtgccgaaaatcatgatgtttatcagcaactattcgttttcgatttatctgcttcatgcctattttatgattataggctacgtgttgcttttgaatatgcccgacattcctgccgtaccggctgttctcctgctgtttgccgtgtgtacagccggcccgattatgacctcatgggcgctgaataagttcaaatatgggtatttatttgtggggaaaatttatcagccaaaacagaagaaggtaacagtcgaagtgcgtgatcacgcagggtgaaaaacaagcggcaggggggctcctgccgcgtttctttacttctcatccgcttgcagaactgtttttaaatatagttttgcagactcagcaagtccagatacatcagccttttcttcatcgaaatacagggcgttttgaatgatgccgtcattcatattgaggaaaaacttggcgatagtcgcaagaggctgaagcggctgaaactctccctgatcgatccctttttgcaatagctttgaaaatctttccacaaaaagatcataccttttctccaaatactgcctacgttcctcattccgccaagctgtcactaaatattcaaattgcaccggcgccagcgtatctgctacatcacgcaggccctcagtcagttcatccaaatagattgaaatggcggaccaaacactttggtgttcagctgatttatcaagctttcggagtccttcatccagccctgtttcaataatgcggcgaaacatctcctcagtgcttgaaaaataaagatagacaccgccccggctgaaacctgactcttctacaacgtccttcatcgtcgttaattcgaatcctttacgtttaaaaaccgttttggcagcctctaaaatctttgcctgtcgtttatccttgtgctcctttgttacttttggtgacaagatatcgcctgctttctgaaactttcttacctacaagtgtaatcaacccaatcaagatcagcaagcagccacagacaagaaaagcaagtgaaacaccgatccattccgccagcatgcctccgcccgccatgccgaggatggaggcgagggttgtcgcgctctgaatggcgccaaacaccctgccgctgtaatcaaccggcactgttgtttgcacgagaatttgaaatggaatatggaccagaccaaaagccgctcccatgatgaaaaaagcgaaaataaaaagagcaatgccggcaattcccattccgctcagaaatggcacgcctccagttgctagtccaagcagaaaggtcccagctgagaaataaagaaaataagaggtgattcgccgtctgccggcaattgccgccgtaaggagcatgccggctccgctgacggccatgcaccagcctgcaagctcaggcggagcgcctgaaaaagaacggataagaatgatagcctgggaatcaccaatctgcaaaacaaagagaacgacgcaagctgtgagtaagcctattaaaagaagcggcatccgtttcaaatactgaaggccttctttaatagaagcaagtgctgatgttttttcttgaggtgtattggctttttgtaaaaaagcatctttggggaggaaaaacaaaatgacagcggaaagaagaaaggcgccggcgttaatatagaaaacagaatgtatagagacagcagcgatcagcatgccgccaagggcagggccgaagatttttgcactgttatcaatgatgctgctggcggaaacagcctgctgaatgtgtgcttccggagccaattccttaagctttccgtttttagcaggtgaaaaaagtgaagaaaaacagctctgaaggcatagcaatacgtaaagctgccaaagctcactgacataaacgcagctgataacggtgagggcacgtccgatttcagacagaaacatgatcgtttttctgtcaaaacggtcggcaagcagacccgatacaggtccgagtacaatgacaggcaaagcaaacgacatcattaaaagcgacatatctaatggagaagcatgaagctgaaaagcggctaatgttagcacggccaaaatgtgaagccagtctccaagtgaagaaatggtttgcgaggctaacagtgtcatcagtcctttttgattgcgaaacaacggtttttccatgattcatcctcctgattattaaaatgacactagtgtcgttttttattgtatgggaaaaagacacaatatacaatctttttcttgtaaaataaaagataagagtgaaaagaagggggaacatgcatgacaacagacaacttaagctacccaataggagaatacaagccgagggaatccatatcgaaggagcaaaaagataaatggattcaagtacttgaagaagtgccggcaaaattgaagcaagctgtagagggcatgacggacagccagcttgacacaccataccgggacggtggatggaccgttcggcaagttattcatcatctggctgacagtcatatgaacagctatattcgttttaaattgagcttgacggaagagacaccggctatccgtccgtatgatgaaaaagcatggtcggagctaaaagactcgaaaacggcagatccgagcggctcactcgcgcttttgcaggagcttcacggaagatggacggctctgctccgaaccctgacggatcagcaatttaagcgcggattttatcaccctgatacaaaggagatcattaccctggagaacgcgctcggcctgtatgtctggcactcacatcaccatattgctcatattacggagctttccagacggatggggtggtcttaacgcttttgccggcggaaagccggaatactgatagcagcaatcactagaagtgagatcacagcagccgctgcatataaatgatcatagccgctggcgacactcgcatgaatggcgtcgcttatcgcggttttgacttcaggaacgggaatgcgttcgatttgttcttgtaaagaagaaacatcagaactgtcgatctccggaatcatctgcatcgccttttctgaatgtccgctgtccgataagcggctgttgatctcaccacctatttggtcaaacccggctgtgataaaacctgcataaagagtaggcgccaaggtcagtccaatttgccttactaatgaaagcgtgccaagagctgtacccttatttgtttttgccgcttctgatacaaggacgttcagcggagcgcctaacagaaaaccaaaaccgatcccagctgccacacttgcgatcacaaactcccatttttccgtcacccagagcggaaataaagcaaaccccgcacatgagatgattcccgaaagaataacggtttttacaggaccttttttgtcggtaagcgctccgccaagccaagcgccgattccggaagccaacgcaagcggtgtcatccaatagcctgcttttgcggcagggacacccaaatactgttcgacatatgacgggataaaaatgactgccgccaagagccccccggataacaaaccgatgataagcgtgcgctgaaacatatggtttcgcagcagagaatacgccaaaatgggatcgcctcctcgcatttcaactctcttttcatacgagataagcgctgcaaaacagagcatgccaaaaataatacatccataaacctccggattccccaagctgtgtaagagatttgccccgtcaaggttcgtcatgccgtacatcacggctaaaatcgacagggacagaaggaagattccggccgcgtcgaggcgcttagcttcaggtgcttttgtttccgcgataaaatatgcgccgaaaacaaccaatagcacggcaatcggcaaattaatcaaaaatagccaatgccaagacccggtccaatcaagcagaaagcttccgatatttggcccgagcacagcggccatcccgttcattgcgccaagcagcccaagcgccttcccctgtttttcctttggaagggtcgcgagaatgtgagagctgccgatgatgaaaatcccgccgcctccaagcgcctgaatcagccgcgatatcagaaagagcgggaagctttggctcaaagcaacaagcaaagaaccaagtccgaacaggcaaacctcaatgagaaagagtttttttctgccgtagcggtcggaaagttttccgacgattggcacactgacgctaagaccgagcgtataaagggtaatgccccatgatccccaggaaggggaaacggaaaacgactcgtttatcgttgttaaagcagccgaaataattccgttatctaaagcagccataaacacgccaatcgtaaacaggctgattgcccacttttggcttttctgctctgttaatgcttcagacattttcgtcaactccttttagttcacttgaaatatattattcattttaaatgaactaaatgtcaaataaaaaaagcctgctcccgcagtttgcggatgacagacttactgatttattcttttttcgcattctctaatgctcttgaaaggatagatagcccttcggaaacagcctgcttttcttcaggggacagcagctctaatgaacgcttcaatttcaggtggcccttttcatacaaaccccggaaaatctttttcgcattctctgtcaactgaacaactacagagcggcggtcctcttcagaatgtgagcgtttgacaaatcctgatttttcaagccggtcaagcagcccagttgtattggacagggaagcccccattttttcagcaatgtcgctcactttcaatgttccatggttgtttaatagcatcagcaccttcatttgcggcatgctcatatccagtttcatccactcggacacatcaccgagcccggcggacgttaagactttcatatagagcacccatatttcccgttcctccgatgaaagaatgttttcgtttaatactgttgtatcgtgtaaattatattccatttcatcacttcctcatcattcactcctcttaccatattactcgattttcactcctgaaagaaagtgagcagaaaccgcatgcgggactttgtccgaaaaataacggtagtgtataatgagttggagattattgggggagaggatcgaactagaatatgattggagagaccattgctgattaaaaagaatgctttatcaatattaaaaatcgtttttcctattgctgttttgctatttgttatttatcaatcgaaaaaagaactgacaaatctgtcattcaaacgtacgctcatggtcatcaacggactggaacgaacggacttattcatgcttgtgttgatcggcttgctggctgttgcggccatgtcgctgtatgattacgtcctgaaatactcactgcgcctatcgatcacaaacggaaaagtattcagggtttcctggatcgccaattcatttaataatgtgttgggattcggcggtttagccggagtcgggttaagaatgatgttctataaggagcatacgaaagaccataaggcactcgtgaaaggaatcgcctggctcacatcatctatgctgctcggattatctgttttcagcattttcgtcgctgcgagagtgctgccagtggatgaagtgattcatgaaaagccttggctatgggcggtcgttatcggttttgcgctgatattgccgctgtctttggcggtgtccaaaataaaagaccgcaaagctggggacgaagagaatgcggataaagtgaaaaatccgattttcgcatatattggagcttcagttgttgaatggctcatggccgggaccgtcatctattttgctttgttcgctatgggcattcatgcagatatcaggtatgtgttcggggtgttcgtcattgcggcgatcggaggaatgatcagcctcgtgccgggcggcttcggctcgtttgaccttttatttttgctggggatggagcagcttggctatcatcaagaggccatcgttacttctattgtgttgtacaggctcgcctattcatttatcccatttatcttgggactgttctttgccgcaggcgacctgacggaaaatacaatgaagcggctcgaaacgaacccgcgcatcgcaccggcaattgagacgacaaacgttctgcttgttgttcagcgtgcggtattagtgagaattttgcaaggctcgctttcccttattgtgttcgtagcaggtctgattgtcttggcctcagtttccttgccgattgacaggctgacggttataccgcacattccgcgcccggcgcttttgctgttcaacggcctgtccttaagctcagcactcattctgctaattttgccgatcgagctttataaacggacaaaacgttcctacacgatggccattacagcgcttgtcggcggctttgtgttcagctttttaaaagggcttaacatcagcgcgatattcgtactgccgatgattatcgtattgcttgtgctattgaaaaaacaatttgtccgcgaacaggcatcctatacactgggacaattgatattcgctgtggcgctgtttactgtggcgctctttaactacaatctgatcgcgggctttatttgggaccggatgaagaaggtgctgcgtcacgaatatttcgtccacagcacctcgcatattacacatgcaaccatcatggcgatcatcattgtgccgctgttcttcttgatatttacagtggtctatcataagagaacgaaaccgatcggagagcaagctgaccctgagcgtcttgctgcgtttcttaatgaaaaaggcggcaacgcgctgagccatctcggttttcttggagataagcggttttatttttccagcgatgggaatgcactgcttctgtttgggaaaatcgccagaaggctggtcgtgctcggcgatccgtctggccaaagagaatcattcccgctcgtgctggaagaatttctgaacgaagcgcatcagaagggattcagtgttttgttctatcaaattgaacgagaggacatggcgctgtatcacgattttggctacaacttctttaaattgggcgaggaagcatatgtagatttaaatacatttaccttgactgggaagaaaaaagccggccttcgggcaatcaataaccgctttgagcgggaggagtatactttccatgtggatcatcccccattttctgatgcgtttttggaggagctgaagcaaatctcagacgaatggctcggctcgaaaaaagagaagggattctcgctcggattttttgatccttcctatttacagaaagcgccgatcgcctatatgaaaaatgcagaaggagagatcgttgcattcgcaaatgtcatgccgatgtaccaggaaggagagatatcggttgatctgatgcgctatcgcggcgacgctccaaatggcattatggacgcattgttcatccgcatgtttttatgggcaaaggaagagggctgcacgtcttttaatatgggaatggcacccttggccaatgttggcactgcctttacatccttctggtccgaaaggtttgccgctgtcatttttaataatgtcagatacatgtacagcttcagcggcctaagagcctttaaagaaaaatacaaaccggagtggcgagggaaatacttagcgtatcggaaaaacagatctctttctgtcaccatgttcctcgttacacgtctgattggcaaaagcaaaaaagactccgtctaataagacggagtcttttttttatttcgtttttaagaagtaggtttcaatatcatcaagcagatagtttgctgctttaattccgcctgcggttgtccacacgacgtcatcgacttcatgtgcattacctgacttcacggcctttaggtttttccatagtgaactgcttgtccactgattggcccatttttcattttcttttgcattatcggctttataagtgaaataaaacagcacatcagcatccatatcaggaatagattctttactgtcggttgagaacgtaaattggtccttttgtttcttaaacagctccacttgtttttcagggcggttgaagccaagctggtctaaaataatcccaggaaatgaatcggtataatagattcttgactcaccggataaaaagcgtacgacagaaacggttttgtttgtctggtcgcccagcttgttttttaaatcagaaacacgtttatcaaaatcggcaatgacttccttgcctttgtccgccttattcaccgcgttggcgtatagagtcaggttatccttccagttcccggccaaagattcagcaaaaacagtcggcgcaatcgcatttaactgatcataaattttttcctggcgcactttgtttccaataatcaaatcaggctttaattctgcaatggcttccacattcggttccgtttcaagaccgacgtttttaacacctttcatgtcatctttcagatagtcataccacgggtcgcccttccatgactttacggctccgaccggcttaatgccaagcgctaagagcgcctctgttccttcattagttaaaacaacaatccgttttggattggcggggatgttgtctgatgtccccattgcatgtttgaccgttcttgttttgctgcttgacccctcgctgttgcttgaactttctgaactattacaggcagaaagtaccataaaggccattaaaaatacgaatagcatgctgatatgctttttcatctttttcctcccaatattgaaattcattatcatttagatcataataagcagtgttaagagtgtcaatccctaattgaggattattctcaaaaacaaacattgcatagtaaataactaggagaattagatcatgatctgcaaaaaagcatcttcaaaatggattgtgttagtatgtctgattttcattttactggcggctgtctgcgcaagcgtcgtgtatggctatacaggtacgtcatggagacaggtctatcaggcgtttacttccttcaacggaacaaatgagcatgtcatcatcaaggatgtcaggcttccgcgcgctttggttgcgacagtcgtcggcgcctcgcttgcagccgcgggcgctctcatgcaggcgctcacaaaaaatccgcttgcgtcaccggggattttcgggattaacgccggtgcaggtttttttattgttgccggatcgttttttctgcatattcagtcacctcaggcgctagtatggagctcgtttcttggggcagcatttaccgctgcgatcgtctatgcagcaggctcgcttggaagagaaggactgacgccaatcaaactgacgctggcgggagctgccatggcagccatgttttcttctctgacacaaggcttgctttctgtcaacgaactcgagcttgcccaggtgcttttttggctgactggctctgtgcagggccggagtctggatctgttgatgacgatgtttccatatgcagcggcagcgctggtaatctgcttctttctcggccaaaaaattaatctcctcgttatgggagaagatgtggcaaaaggactcggccaaaaaacgggcctgctgaaatttgtgatggcgctttgtgttgtcatgcttgcagggtccgctgtcgccattgccgggccgatttcttttatcggcatcattattccgcattttgcccgctttgtcgttggtaatgattatcgctgggttctgccattttccgctgttttgggtgccattttgcttgtttgcgcggatatcggtgcgcgatatatcattatgcctcaggaagttcctgtcggggtcatgaccgccatcatcggaatgcctgtgtttgtgtacatcgcaagaaggggggcgaagctatgaaacttcgttttggcgttactgcggctgaaaagaaagcatggatcgtctttttggttttactggggttaacagctgctgtactcatcataagcgctggtctcggacaaaggtttattcctccctgggatgtagcaaaaacattctttggtgcaggttccaagctggatgaactgatgatcatgtcgttccgcatgccaagaattttgacggctttatgcgccggtgtctgcttggcagcggcaggcgcgatattgcaggggctcgtcagaaaccctctcgcatctccggatattatcggaataacaggaggagcggcggtagcggtcgtgcttttaatgatgttcttctcagaccgcagcagttcacttacgatcagtctgtcatggcttccagcagccgcatttatcggcgcatcggctgtcgggctcatcgtctatttactggcatacaaaaatggcgcctccacatttcggctggtgcttatcggaatcggattttcaatgtcggcgcaggcgatgactaccctgttgatgatcaaaggcccgatttaccgagcatcacaagccaatgtgtatatcactgggtcagtttatgggtcaaactggcagcatgtaaaaatagctattatcttatctgtcattctcttattcatttgttttgtcgcgctaaaaaatatgaatatacaggtgctgggtgaagatattgcggcgggtgcaggaagcgctgtgcagcgaaatcgttttttcttgctccttttgagtacggctcttacgggttgtgcagtttcagttgccggcacaatcggttttgtcgggctgatggcgccccatattgcaagacggcttgtcggctcatcttatggcgcgctgctcccaacgtcggcacttattggggctctgctcgttttaacagctgatatcgtcggcagaaccttatttgctccggtggaagtgccggccggcgtctttacagcggctatcggcgcaccttattttatttatttgctctataaaacaagaaattcttgatcgttacacccattttcttaaaaaagaaaatgggtttttttgataatgactgaagattcgtaattatttttgctatactgacagagacattgataaagaaagggcggcagatgaatgaaagaagcagaggtattaaaatatgaagcatttacaagcagtcccggcaaaggaaaccccgcaggcgtcgttttgcagggagacgattatacggaagacgagatgcagatcatagctgaacgtgccgggtattcagaaacctcctttatccgaaaaagcgagtcggccgatcttgaactccgttactttacccctggacacgaaatgaatttgtgcggtcatgcgacagttgcttctctttacgcattatgtgagaaaggaatgctggagagcggtaaaacgtacagcatccaaacgaaagcgggtatcctgcctgtgaagatttctgaaaaagatggccgcattcatatcacgcttgaacaggcctctccgcaattcaaaccatttacaggcgatcggaaaaaacttgcggacgcactgggtatcaccgatgaagattttcatgaagaccttccgattgtgtttggcagcactgggatatggacagccatcgttccgcttaaatcattggaggcttccaaaaaaatggtgccagataacaaacaatttccggaagtgttagttgatctgccaaaagcttcagtccatccgtttacctttgaaaccgtccatcccgacagcgacctgcacgggcgccacttttcatccccgtattcgggaacgattgaagaccccgtgaccggcacagcatccggcgtgatgggggcttatatgaaacattatggcaatgccgagcagcataaatttatcattgaacaagggcaggaaattggaaaagacggaaaagtggagatcgaaatgaacgaagccggcggccatgtgaaagtgaacatgacaggaacagccgtttactcagaaacccgtattcttaaaatctaatacggatgatggtttacaaaaagatgcactttccgttatcattatgaaatgataatcattttcaattgcataggaaggtgagacggtatgcctcaaaccgaacaaatacatcagcattcagtactgcgggacatcatacgcagcagaagatcgattcgaaagtttaaacaagagccagtaccttcagcagtcattcttgacatgcttgaaacggcaaaatatgcgccaaatcacagagtgacagagccatggagatttatttacgtttccagtgagacaggtaaagcgaacctcattaatacatttgcagcgttctctaagaaatccaagccggatatgacagaggaaaagcttcaaaatttcaaaaacacacttgggcgcgttccgggatttctcctcgtcgtgtttcaggaagatgaaaacgaaagagcgcgggacgacgattttgcggcaacaagctcgttgattcaaaatcttcagcttctcgcttgggaaaaaggaatcggcatggtttggaaaagcggaaaaatcctttatgacaaagaagtccatcaggcctttggtttacaggataatgagcgtttcgccgccatcatacaaacaggttatcctgacgaggcgccggaagtgaaaaaacgcacaccgatccgcgaacggtttactgaaatgtaaaaagccccttgtctcaaacggagacaaggggtttttcattaacgagatttctttttcgctctgttgtcggctgctttcgcacgctcttgcgcttcgcggtcatctgcatcagcaagctcggttgaatattcttcgtaaacgccgtcagtttccctttttaatgcatcgggaacttgtggaagcttttgtttgtttttatcacggtttttgtggatatgatttctgcccatatcaaattccccctaaaaagtgatatcaaacaaatatagtatttggttttaaggggctatgtattcctacttccgcttagcagctttttccgcttttttaaattcgcctgaataaagaacttcctgcatttttttcaggttggcgccttgctggtgcttctccctctttttttccataaaaaggacctccttcaaccatgttattcttaaggttgacgcttcctgctgtttttatacagtctttcggtccgctatcagctgtgagagtgcaaattcaagatccgaatatgtaaaacgaaatccagaggttatcgcttttttcggaagagcgcgctgtcctttcacaatcaaaagactcatttcacccaatgcttttgataaaaagaattccgggacggggagccagtgcgggcggtgcttcacccgtgcaatcgtttttccgaattgcttcatgtccacaggattgggcgcggtgacattcattgggcctgagatgccggcgttttccaccgcatatcggatcatctgggccgcatcctcgacatgaatccatgacagccactgccttcccgttccgatcgttccgccggccagaaacttataggggagaatcatgagcgggagagcgcctttttctccaagcatcacgccaaatctcgcataaaccgtcctgatgcccatcgcctcaatatgctgtccttccttttcccacaggtgtgcagtatggctgagaaaatcctcatctgacgttgcagaatcctctgtgaaggttttctcaagactagtgccgtaaatacccacggcactggcttggatcaatgtgttcggcttctccttctgtttctgaataagccgctgcacttcacgcgtcgcattgatacggctggagagaatgtgctgctttgttttatttgtccagcggccaaaaatcgattttcccgcaaggtttatccagacatcaatatgaggaagttcctgctccggggcggctccttccgtcagccattggacatatgtcatatttttttgttcagtttcccgtgcgtttcttgataaaatataaacatggtgtccctggcgggtaagaacgcctgtcagatgctggccgagaaaaccggttccgcccgtcattgcgatattcatgaacatctctcctcatcgttctaataaatatactttacctcattttaataaaagaaaacgcgtttcaggcctgagaagggagattaagatgccgtttattacaaaaatatcaacgcaaaaaaagaatacggaacgcttcaatatttttctggatgataaatacgccttcagcgtggacgcggatgtgctcgtgaaatttgagctcaagaagggaaaagaactcgatgatcttgacatcattgagattcaatacggcgatgaagtgaagaaaggcttcaaccgtgcgcttgactttttatcctatcgaatgcggtcgacgaaagaggtcgaggaccacttaaagaaaaaagaaacctcgccccccgtcattgcggaagtcatccataggcttaacgattacaagtacttaaacgaccaggaatttgccgcagcctatgtcagcactcacaaaaaaacaaacggaaaaggccctgatgttttgttcagagagctaagagcgaagggaattgatgacgatacaattaaggaggcgctaagttccttttcctttgaagatcagacaagagaagcggtcaagcatgttgaaaagcttctcaaaaaagataaaaagctttcgacgaaagaactcaaacagcgcgcccagctgcagcttcagcgcaagggcttctcatttgatgttatcagcgcggcgatggatcagattgaatatgaaaatgatgaagacacagagaaagaagcgctgcgccttcacgcggaaaaagcgtttagaaaataccgctatgacggctcatatgaaagcgccatgaaggtcaaacaatttttattccgcaaaggattctcactcgatttaatcgagcaattactgcaggaagaggagtactgaaatggagaaacgatacagtcaaatgacaccgcatgaactcaataccgaaatcgcattactttctgaaaaagcaagaaaagccgaacagcatggaatcataaacgaactggcagtgctcgaacggaaaattacgatggcaaaagcatatttgctgaacccggaagattactcaccgggagaaacatatcgtgtggaaaacactgaggacgagtttaccatcagttatttaaatggcgttttcgcatggggatacaggacctcttcccctcagcaagaggaagcgctgccaatctcagtattgcaagaaaaagaataaagcgtaacaggaggctgatgatcagcctctttttgtttgcagcacatttacacgaattcttaaagaaaaaatcattgaattcacttgaaaaatcttttaagatgaaactcgttgttttttaaaatcaaaggaggcgatgacgttgagtatcaaaaacccatctgtaaaatttattatatttgttcttatgatttgtacattttcaatcggctatacagaatacgcggtgatgggtattttgacgtcgattgccaatgactttcatatacaggtttcatccgcagggcttcttgtcacggcttatgcggcaagcgtttgtttgacagggccgctcgtcaccatcatttccgtcaagcttccgagaaagcctgtgcttcttgggctgatggcgatatttatcctttccaacctgatgagcgcactggcgccgaattttgcggtattggccatttcaagaattttatctgcgtccattcacggcgctttcttcgcgattgccatggtattcgcaagtgaaatggttccgccggaaaagcgtgctgcagctgctgcttcaatgaacggcggactgacagtggctctaatgcttggtgttccattcggctcttatctcggagatgtcctgaattggagagcggtgttttccatcattacggcacttggtgtcatcggatttttaggccttatggctgccgtgccgaacagaaaaccaaaagtgatcccaatgcttatgaatgagtggggtgtttttaaacacaaacaagtgctgttttccttcgcgattaccattttaggctattccggtgtctttatcgcctacacctttatcgaacccattttgaggcattcagccggattcagcacggttggcattacaggtgctctctttgcgtatggattgggaggcgttgccgggaatttctttgctggaaaagtaccgctacctttgctgactcggacgatgatcggcgtaatgatcggtttaatcggtgttctggctgtatttccttacatcgccatttacccggctgcagccattgtggcaacgttcctattcggggcatgcgcattcggcacgccgcctcttttgcaaacaaaggtcatttcatcatctgagggcggcacgaccattgccgcagctgtcagcgtatcagcatttaaccttgccaatgcccttggtgcatggatcggcggaatgattttaaacggaacaggctcttattcctggctgtttgcaggaggtgcgcttatgactgcatgcggacttgtgctttctaccttcgcacacttatcagaaaagaagagcgtctacgaatatcaagtcaataaagggtaaaaacagctgcagtgtatgcagctgttcttctttaccgtttgcctgaggctctcattctttcttgaggatgctgattgattgatccgtcagcacgctttgaagcatagtcgtcctttgctctcggttcaccctgaaatttgttttcgttttcgtaaggaaatcctttttctttatttcggaccatgtcatatccccctaggttcgagatcaaaaagttgcgtctttccagatgaagacgtaaggttagtatatggagaacaccacgtaataaagcgttatttttttcctgaagaaaggagactgcacacatgaatatgtacattgagaaactgactaatctgcttctggaaaagaacgagatgatcagctatatacaggcaaaaacgtgggtggaattgttatggagcgatttcgaagcaacctatgcaaaagccggacacgcctatcaaggtgaaaaaatgactgaaaaaatcgtcacacaatggattgaaaactatggtggccagctccacctttttcaaagctcccgtaacgacgtgaatgattacttaaatcaaagcaaaggccttttgcactaaaaacctgccgttaacgaccggcaggttttttcattttcttaaaattaccttaacaggaagaaatcataaacaaaacatgtttcaccagcctgtcaatcagggaataccacttatatcttgtcaaaatgcgaggaggagctttatatgaaaaagaaacaagtaatgctcgctttaacagctgccgcaggactgggtttgacagcacttcattccgctcccgcagcaaaagctgcgccccttcacgacatatctgtcagcatgccatcatccgattcttacatcataaaaacaggaaagctgaatgtccggactgagccaaatcataaaggtgacattctcggcactgtatcatcagaacaaaaagtaaaagtctatggatttgtaaatgccgattgggctcaaattcatttcaaaggaaaaaaagcgtatatttcaacccactttttaatgaaaaccgcaagccaagcgaaaacaatgaaacagacagccttctatgcaccgacgcccgaaaatggaaaagctaaacagctctcatctggaacagaggtgacaatacttgggtggggattcagtgaaaacggcggatttgacttcacttgggcgttcgtggattatggcggagttaaaggctatattcacacaaaggatttacaaatgcgataaaaaggcaggccgaggcttgtctttttgcctatgcatgaaacatttctcctttctgcacgtaacaatgagaaaggagatgatgatatgacgggtttagtcggcggagggcttatgatcattgcgggcatactgatcaaactgtttcctcccaaatcgatcaacagtgtgtacggatacagaacgagacgctcaatgtcagatcaaagattatggaatgaagcgaaccgttacagtgcatcattaatgatcctgtcaggcttggtgattgcgggaatgggtttgctgctgggatcaaacttgtttattcttcagcttatcctgctgattgccgcctgtgtcataacatttatgctaacggagaaaaggctgaaaatcatgacgcacagtcaaggaggagatagaagtggacggagttaaatgccagtttgtcaatacgaacggaatcacgctccacgttgcagccgcaggaccggaagacggcccgttaattgtcctgctccatggatttcctgagttttggtacggctggaaaaatcaaatcaaaccgcttgttgatgcgggttaccgggtcattgctcctgatcagcggggctacaatctcagtgacaaaccggaaggaattgattcgtatcggattgatacattaagagatgatatcatcgggcttattacgcaattcactgatgaaaaagcaattgtcatcggtcatgactggggaggggctgtcgcatggcatttggcttccacacgcccggaatatcttgaaaaactgatcgcgatcaatatcccgcacccgcacgtcatgaaaaccgtaacgccgctttatccgccgcaatggctgaaaagctcgtatatcgcatacttccagctccccgatataccggaggcatcactaagggaaaatgattatgaaacattagacaaagcgattggattatccgaccgtcccgcgctttttacatccgaggatgtcagcaggtacaaagaagcgtggaaacagccgggcgcgctgacagctatgctgaactggtacagagccctcagaaaaggaagcttggcagagaaaccctcttacgaaacagtaccttaccgaatgatctggggaatggaagaccgctttttgagcagaaagcttgctaaagagacggaaaggcattgcccgaatggacatctcatctttgttgatgaagcttcccattggattaaccacgagaagccagccatcgtcaatcagctgattttggaatatcttaagaaccaataagctaaaatttctctccatccgtctgtcataatggcagactttttctgtgcgtttttttcatagtctgttttaaacatgacaaaataaaattaaaaatcatgaatgtcaccataaaattgtaacaaaaaacaggtttaaacgactttaaaaaaaggaatagccttactgaagatttgtgtaaaactcccctaaggcaatacttaaaaagaataataaaaagaaggtgccttaatgaagcaaggattaatctcgattattatcccgtcttacaatgaagggtataatgtcaaactcattcatgaatctttaaaaaaggaatttaaaaacattcattatgactatgaaatattcttcataaacgacggaagtgttgatgacacgcttcagcagatcaaagacttggcagcgacgtgcagccgggtaaaatatatatctttttctcgaaactttggaaaagaagccgcaattttggcgggctttgaacatgttcagggcgaggcggttattgtcatggatgccgatctgcagcatccgacatatttgctgaaggaatttatcaaaggctacgaagaagggtatgaccaagtcattgcccaaaggaacagaaaaggggacagctttgtccgctcactcttatcatctatgtattacaagttcattaataaagcggtggaagtcgatttgcgtgacggtgtcggtgacttcagattgttaagccgccaagctgtgaatgcacttttgaagctgagcgaaggaaaccgcttctcaaaaggccttttttgctggattggctttgatcagaaaattgtattttatgaaaatgtcgaacgaaaaaacggcacctccaaatggtcgttcagcagtctgtttaactacggaatggacggcgtcgtttcatttaatcataagccgctgagattatgtttttatacaggcattttcatcctgctgctttccatcatttatatcattgccacattcgttaaaattctgactaacggtatttctgtgcctgggtatttcaccattatctcagcagtgttatttctcggcggagtacagctgttaagcctcggaattataggcgaatatatcggccgaatctattatgaaacaaaaaaacgcccgcattatttgatcaaagaagcgaatatcccgaacaaagacctgcctgaaacgaacgaattaaaaagcatgcggcgtctgacaaaaatgcactgaaaataccaagcgccattggcagtgctttttttgcgtgtctattatcttaaaagcaagactggagaatttatatgaaaagaaaacatatcatgatctatgcggccagtttgctggtgtccgttctggcacacgctttttttgtgaaagaatgggcggaaggcaggtatatgacaggtccgggtgacgggcttgcgcaaatgatcgtatttaaaaaattattatttgaccaatatacacacgggaattttttctacaattattcattcggacttggcggcggcacattcagtcagctcggctattatttttctgcgtcttttctttttcttgctgtgtccgccgctgtttggctgcttcaagccgtccagctgatcggagaagcggatacgcttttttgggcagagtcagctgtttttatcagtattttcaaattgagcttgatcatctttacgtccgcttctgtttttcattatcttctcaagcacagggcggcatcgttcacgggagctgtgttatacggcgtctcaattatttatttccgtcacgaagcgtattgggaatttttcaccgatacaatggtttggcttccgctgcttgtgcttggcgcagaaaaaattattagagagcggcgtccggcgtggtttatcgttgcgtgttcgctgacgttaatcaataacttttactttgcatacataaaccttatattcatcggaatctatgtgctgttcagatggctgatccgtttggaaccacatgaagagaaaagatggattcaaatcagattatttctcgtttcaggcttcatttcttttggcatcagtgcggcggcgtttgtgccggtagtatacggttttttaaacaacctgcgccctccatacagccagaaaatagagtggctcaatttcgatgataatatcttattttcgagccggatcatcattgtgccggccgcttttctgctgtttttgtttatgatttctttttacaaaaaccgtgtgtttcgtctctttgccgggttgagcctgctgtttattctgtttcatttcagtccgtatgcggcaagcgtctttaacggtttttccgccccgcaaaaccgttttgaatatgttctggcctttaccattgcgggagcagctgcggctggtttgtcacagctgtctgaattgaaacggaaagaactgctcccggccgcagctgtcgtcctgcttctttacttgtatcatattcaaaggtataagctcgatatatggaagcctgcgaatgaaagtattctattgctcttactcatgacaatcgcagccttgtttgctgcagcttttgcgaaaaaacgggcaaaaatggctgtgcacggtataatcattctttcttcgctgtttgtcgccaactcctatcaaaaatacgcgctctcagaaggcggcgatttggatagtgtgacaaaagaatatcttacaagtgaggaatacagagggcgggaatcatctgagctcatcagacgtttacagaaggaagacgatgatccgctcatgagaatcgactggatgaacggggtccgcaataatacgccaatcatttacggatttaatggcttcagcgcgtattccagcattttaaacaaagatctgctggccttctattggaatgatttaagcatcgatatgggcagggaaagcgtcagccgttacgcgtcattgggagacagggcgaatttatacagcctgctttacggcaaatattatatgaccgaaaaaacaaacgaagccagcgtcccgtacggcttcaaaaagcatttagaaacagagcattatgcagtttatgagaatcagtacatgcttccattcgtcaaaacagcggatgccatatacagcgaaagtgagctggaccgattgcccgctcttgcgaaagaacaggcgatgctgaaaggaatcatattaaaagatccatcaggaaaaacggagcagacaccaaaaccgtccaatttgatcaccaagtcggacatcactgcaaaacaagcccagtatcaaaacgggctgctaaccgtaactggagaaaacggaggagagctgatcatcaccccgaaacagccgtcatccgctccgggagactactatgtcagcttttatttgaaaagcaaagcaaaagacaaaggatttacgttaaaggtaaatgattatgtcacaacaaggaaatcgaacaaatcgatatataaaaacggagtaaataatataacggtaagagtgcctaaatcacgccatatctcaatcaatcttccgaaaggaacctatgagctgagaaacatagcgctctatgaagaaaattaccaaacgctgaaaaacgctgtaatgcaaaataaaacagagaaagcagacaaactgaattggaacaaaaatcgactgacctttgcatatcatctgtcaaaagaccagtacatcatgcttccgatcccatatgaaaaaggctgggagctgaagatcaacggaaaaacacagaagatcgaaaaagcggattatgcttttataggcttcaaggcgcaaaagggagacaatcacattgagctgacttactatccgccatacttcaaaatatcggcgatcatatctctcgtcagtctgctgcttgctgttttttatataagacgtaaaaagcccggctctatatagagccgagctttaattttttctgtagtttttcttcgctgaatatccatcccgtataggatgaacgaattgtgagatcatggccgatatgaacaattgcgacaaacggataatggcctttgctccgataacgcaggtcgataaatctcacctcataatgatctttaaacgtatccacttcccaccggtaaaccggagaaaaggacagaaacgccgcgatgttatcatcctgctttgccgcatgcattacatcggtttcaggaacaggcacccgattaaatgtatccagaatcacgacatgtccttccatgcttcttcctacatagaaagcatgtgctgtcgtcactgcgattcgccattgcctgaatttcatcgttggagaaataataatgctttcgatctcatcatgaatcatctcatgaagcttccgtttaattctcagctgcatgatcaggcgcaccaagtagtagcctgccaatatgatatataagctgagaaacgtgatgccgggactcccgcctgcataccaaatcgcgatagctgccagatggctgataaaaataaacggatcaaacgtattaatcagcccgagcgcaacccattttttcgaaaacggacgaatggcttgtgttccataggcgttgaatatatcaacaaagacatgcagaacgactgccagcagtgtccacagccacaggtgcagaaaatcggcctgaggataaaataaatacagaatcgccgggatgatgacagaccaaaacaaaacggcgggaattgaatgggtaaatcctctgtgattccttatataaacagcattgtttttaagctttaacacagtatcaatatccggagcctgagagcccgcaagcgttgcgatcataacagcgtgagccattgccggatctgatccgacaacaggatcaagcgtcgcaataccgcccagtgcgatgcccataacgacatgtgtgcccgtatccataggtgacctccttgcagggtgatcctgcacattcactttgtaagaaattccccattttcatatacccaatttttaaactgattcaatcgttctcatatgtttccgctttttctttattactatttaatgtaacatattatcgtactgtgcccttagtgtacaacaaaaaacagtctaaagaaaagcggggcgcgaaagactggggagaaacacatatgaacgtacttgaagacaaattaaaacaaaaagacatacagcaatttcgcgatgatttaatctcatggtttgaacgagagcagcgcgttttgccgtggagagaggaccaagatccatataaggtgtgggtatctgaagtgatgctgcagcaaacgagagtagagacagtgattccttactttctccggtttgtggaacaattcccgacagtggaagcgctcgctgatgctgatgaagaaaaggtgctgaaagcatgggaagggctcggctattattcgcgagtcagaaacctgcaaagcgcggtaaaagaagtgaaacaggaatacggcggcattgttcctccagacgagaaagattttggcgggttaaaaggcgtcggcccttatacaaagggagcggtgctcagcattgcctacaataaacccattcccgcggttgacggaaatgtgatgcgtgtcatgtccaggattctatctatttgggatgatattgccaaaccaaaaacaagaacgatctttgaagacgccatacgagcttttatttccaaagaaaaaccatctgaatttaatcagggcttgatggagcttggagccttgatctgtacgccaaaatcaccctcatgcctgctttgcccggttcagcagcattgctcagcatttgaagaaggcactgaacgggagcttccggtaaaaagcaaaaagaaaaagcccgggatcaaaaccatggccgcgatcgtactgactgatgaagacggacaagtgtatatccacaaacggccgtctaaaggtttgctcgccaacctgtgggaatttccgaatcttgaaacacaaaaagggatcaaaactgagcgtgaacagctcattgctttcttagaaaacgaatatggcatacaagctgatatcagtgatctgcaaggtgtagtcgagcatgttttcacccacctggtatggaatatttcagtgtttttcggtaaagtaaaacaagtgtcggataccagcaagctgaaaaaagtaacgaaagaagagctcgaacaatttgcgttcccggtatcacatcaaaaaatctggaagatggcagtagaagcagccgccatctcggctgctccgtaaaccattcttaatcgtaagagacgcgcgtgccgtggctgtagtccgcttcattgcgcttcattccgccgcgcgcttcaatttcttgcgttaattcccggtattttgattggccttcttcgttcaaataaggcataatttgctgaaaggcatgatgaaaataagcgagttcactgttcttccaatcttttttggaaaccatgttcaattcgctcatatcacgtccgacatacataacagaagaccccctttaaagttcttgccattattgtttgtggaaataaaagaactatacgctacaaggagatgaggaaaaatggaacaaaataaatgtgcactcgtaacaggaagcagccgcggtgtcggaaaagcggccgcgatcagacttgctgagaacggctataatatcgtcattaactatgcacgcagcaaaaaagcagcattagaaacagcggaagaaatcgaaaagcttggcgttaaagtgcttgtcgtaaaagcaaacgtaggacagcctgcaaaaatcaaagaaatgtttcagcaaattgatgaaacgttcggcagacttgatgtttttgtcaataatgccgcttcaggagtactaagacctgtcatggaattagaagaaacacactgggactggacgatgaacattaatgcgaaagcattgcttttctgcgctcaggaagctgccaagctaatggagaagaacggaggcgggcatattgtcagcatcagttcattaggctctatccgctatcttgaaaactacaccacggtcggtgtatcaaaagcagcgttagaggctttaacccgttatcttgccgttgagctttcaccaaaacaaattatcgtcaatgctgtttcaggcggagcgatcgacacagatgcgctgaaacacttcccgaatagagaagatctgcttgaggatgcgcgccaaaacacgccggcgggacgcatggtcgaaattaaagacatggttgatactgttgagtttctagtgtcttccaaggctgacatgatccgcggacagacaattatcgttgacggcggacgctcactgctcgtttaaaaatttttaaaaaagaggaatagctatacgatcacctgcacattctaatgaccgtggaggtgataacaatggctaactcaaataacttcagcaaaacaaacgctcaacaagttagaaaacaaaaccaacaatcagctgctggtcaaggtcaatttggcactgaatttgctagcgaaacaaacgctcagcaagtcagaaaacaaaaccagcaatcagctggacaacaaggtcaattcggcactgaattcgctagtgaaactgacgcacagcaggtaagacagcaaaaccaatctgctgaacaaaacaaacaacaaaacagctaatcactgaaacagaaaaaagcacttcatcttcgggtggaagtgcttttttctgtttgaaaaacgacaaaacttgtggaaggtctacagaatgagtcaaagggtttgctttacggagatcgaaatgattaaaggaggaaatgtttatactttcatcaggctgaaggaggaaccgatgaccgaatttgaaaagctggtaagtgaacagatgaaaacgatggataagcttctcgatctccaatcagagctcgaccgctgcaaacaaattgaggcggaactccggcatttggaaagggatgcaaggctgcgtgggattcaggctgaaattgcggtaaaacggaaacaccttgccgatatacaggatatgtttcaaaagcagacagagcaggtcattcgttcatatcgcagctcagaaaagccgtcttcctttgtgtagtgcaggaatgtgccattccccggccggaatggctcttttattttcatttttcaatttgtaacgttataataggtaaaagacgttgtcggtaagcaaatttggacatactaactgtagggctttatagaaagtaggggagaaatatgggctatcccaaggaaggagaaaccattcaaattcacagctataagcacaacgggctgattcatagaatttggaatgagacaacaatcttaaaaagtacagaaatgtgtgtcatcggagccaatgaccggacgatggtaaccgaatcagacggccggacatggataaccagagagcccgcaatctgttattttcacgcaagacaatggtttaatgtcatcgggatgctgagggaagacggggttcattattattgcaacatcagttctccgtttgcctatgatggcgaagcaattaaatatattgattatgacttagatgttaaggtttttcctgacatgacctacaatattctcgatgaagacgaatatgatgatcatcggaaagccatgaattatccaaaagaaatcgacagtattttaagagactacttaaatacgctgctccattggattcaccagcgtcagggaccgtttgcgcccgagtttgtcgatatgtggtatgaacggtatttgcgctatacaaaataatggttacgtaaaaaacctgttgcggggtacaacaggtttttcacatgggctcacacacatcatgataaagagagagggggaatcaacgtgggggttatgaaacgctacatgcaattcgtcaaaccttataagaagcaaattttcgttacagtgttaatcgggatcgtaaaattctccattccgcttgctctcccattgcttctgaagtacgtagttgacgacattattcaaggaggcggcacggccagtgacaaaaccacgtcattgttcacgattatggcgatcatgttcgccttatttttaattttgcgcccgcctgttgaatattaccggcaatattttgcccagtggactgccagcaaggtgctttatgatataagagctaagctgtttgaccatatacaaaaactgagccttcgtttttacgcgaatacaagaacaggggaagtcatttcccgagtgattaatgatgtagaacaaacaaaggatttcgtcatcacagggctgatgaatatatggctcgatatgctgacgattttgattgtaatctctatcatgctcacactggacgttaaattaacgctgatctctatcgttttattcccattatacggaatatcagtgaagtatttttacggccgtttacgaaagctgacaagggagcgctcacaggctcttgctcaagtgcaggggcatttgcacgaacgaattcaaggcatgcctgtcatcagaagctttgcgatagaagatcatgaacaggctcaatttaatgagaaaaacggtcatttcttagataaagccatccgccacacgaattggaacgccaaaacctttgcggtcgttaataccattacagatttggcgccgctcatcgtcatagcgtgcgccgggtattttgtcattaatggaccgctgacagtcggaacaatggtcgcgtttgtcggatatattgacagaatgtacaaccctgttagaaggctgatcaattcctctacaactttgacacagtcaatcgcatcaatggacagggtgtttgaatttattgacgagccctatgaactcactgacaaaccaaatgcgataaaggccgatcagattcgcggaggagtggagtttcaaaacgtttcgtttcaatatgagaaggacaaagaaaatattcttcatgatgtatccttaaaagtaaatagaggagaaactgtagctctcgtcggcatgagcggaggaggaaaatcaacgctcgtcagcctgatcccaagattttatgatgtaacaagcggcagactgctgattgatgggacggatattcgcgattatgaagcaagaagccttcgcaaccaggttggtatggtgcttcaagatacctttttatttagtgaaacgattcgggaaaatatcgcgatcggcaagcctgatgccacacttgaagagataatcgaagccgccaaagctgcaaatgcccatgaatttatcatgagttttccagaaggatatgagacccgggtgggggaacgaggcgttaagctttcaggcggacaaaagcagcggatctcaattgcgcgggtattcctgaaaaatccgccgctcctcattttagatgaagctacatcagctctggatttggaaagtgagcattacattcaagaagcgatggacaaactggcgaaggatagaacaacttttgttgtcgcccaccgtttatcgacaatcacccatgcggataagattgttgtcatggaaaacggcacaatcattgaaatcggaacccatgatgaactcatggactatgagagccagtacaagcacttatttaccattcaaaatttgaactaaaacatcaatcttatatccttttaacgaaggatataagatttttttgtatataaaaaaacccggctgtttaaccgggttactcttctgtttctatttcgcagtctttcggatgatacgtttgaaaacttgtgataagtgtttctaaatgttcaagctgctcgcgatattccacggcgcttgccataatattgagcatgttgtaatcaataagctcctcatccgtattctgctgattttttaaaaatgactttgttaaaagctgcttataccggatgccttcttcaaccgcgtcatcatgcggcttgatttttccgacaaacctcatcaaaatccgttcgtgccagtaaagcaggtaatcaagttcttcagtcaatgtttcctgaaactcttccggcatatgatagatctcgttttccagacgatgcagcttcttcaatgtatcaagcgcccgatttgcagtaataatggcctgtctgaacaggacaagctttcttgatttcacataagtggttttcttaaagtaacttctttcttctttatatagaagatatgtctgatcaagcttgatcattttttctttcagtttttcaatatcctctttcaaaatcgaatgctctgtcgactgccgcatggacaatctgatccacttcataatttcttcggtgttttcgacggtattatgaatcagctttgtttcgtacttaggaggcaaaaacacaaggttgacgataaaggaagaaagcacccctaagatgactgtgcttgttctgatcagcgcgaacattaaaaagtcgtcaccggcagattctaatatcgcaatgactgttacaagagcaattgaaattgtatgttcaattttaagtttcagcatgattgtaatgacaataactgctgttaacccgatcataatcgggctgggtccgaaaataaggccgaacactgtggcaatcacagctccgatgatatttgcttgaacctggtcaataataatgagaaaagagcggtaaatcgacggctggatcgcaaatatcgctgcaattccagcgaaaatcggcgcgggaagcccgatccacgaagccaaataaagggcaagtgtaatcgcaatcccggttttgaaaatgcgggcaccaagtttcattggtttgtgcgtgcattcctttctatagtaaattgtgtgacatagcaaatgggctaatccttaaaattcccggttagtttatttgctaaacaattaagtaatatacagggatcgatacaaatattcaagctatttttctagaaaaagaccaaaatcttacacgttgtttgattccataaaaaaaacaggagctcaaagctcctgttcaaggtatttgattctagttttttagatgtttaaatgcatcctcgaccgctgtaagcgtgtctttaatatcctgctctgtatgtgctgtggtaataaaccaagcttcatacttagaaggtgctaaattaattccgcgttccagcatcagcttgaaaaacgtagcgaatgtttctccgtcactccgttcagcctgctcgtaattttccactttctcatcagagaagtataccgtgagcgcaccttttaaccggttgaccgtaatggtgatgccgtgtgtttctgcgtgcttcaaaatgccttcctcaagcatagcgccaaggtgatcaagcttttcatacacgcctttttctttgagcacttccagacaagcgatgcctgataggatggaagcggggttccctgccattgttcctgcctgataagcaggccctagcggagctacctgctccatgatttcttgtttgccgccataggccccaatcggaagtccgccgccgataattttcccgagtgctgttaaatctggtttcacctgtaagagatcctgcgcgccgccatacataaagcggaaagccgtaatgacttcatcgtaaataacgagagcccctgcattatgtgttaattcatttacttgttctaagaagccctctttcggctccacgataccgaagttgccgacaatcggttcaacgagaaccgccgcgatttcactgccccatttttcaagagctgctttatagctatcgatatcattaaatggtactgtgatcacttcgtttgcaatgcttttcggtacaccggctgagtctggtgtgccaagagtagacgggccggagcctgcggcgacaagcacaaggtccgaatgcccgtgataacagcccgcaaatttaatgatttttgtccggcctgtatatgcgcgagccacgcggatggtcgtcataacggcttctgtacccgaattgacgaatcttactttgtccatagcgggaatggcttctttgagcatctttgcaaatgtaacctcgtgtttcgttggtgttccatacaatacaccgttctctgccgcttttttaatcgcttctgtaatatgcgggtgggcatgtcctgtaataatcggaccgtacgccgctaaataatcgatgtatttgttgccgtccacatcccaaaaataagcgccgcttgctttctccattgcaacaggagaaccgccgccgactgctttatatgatctagacgggctgtttacaccgccgacaatgtgctgtaatgcctcattgtgaagttcaattgattttgtatgcaagaataaaaacctcctatatctccatgcgtcctttctattgtagcatgcttccgaacaagaacaatggcttcgggcttcagattcagctgagatggttgtaatctggacaagaattggatacgcttaataaaaaaacatccggaggtaacgtaatgactatagaaatcggacaaaaagcgcctgatcttgagttaaaaggtgatcatggggaaacagtaaaattatcggattataaaggaaagtacatcgtgctttatttttatccaaaggacatgacacccggatgtacaactgaagcatgcgattttcgggacagtcacgaaagcttcgccgaactggatgccgtcattatcggcgtcagcccggacagccaggaaaaacacggaaaatttaaagagaagcataaccttccatttctgcttcttgttgatgacgagcataagctggcggaagcatttgatgtgtggaagctgaagaaaaacttcggaaaagagtatatgggaatcgagcgttccacttttttaattgataaacaaggccggctcattaaagaatggagaaaagtaaaagtaaaggaccatgtagccgaagcgcttcaaaccctcaaagatatgtcggaaaagtaaatctctatgagcctatgcttacttttaccctgatatcaattgacaaattatcgtagaaagagttacactaattataaacattacaatgtaagaattttttttagaagagaggtgcatgacggatggctgcacatgaactaaaagaagccttagaaacgttgaaggaaaccggagttcgcattactcctcaacgtcatgcgattctggaatatctcgttaactctatggctcatccaacagcggacgatatatataaagctctggaagggaaatttcctaacatgagcgtagcgacggtatataacaatttgcgtgtgttccgggaatcaggtttggtaaaagagctcacatacggtgatgcttccagcagattcgattttgtcacatccgatcactatcacgcgatttgcgaaaactgcggtaaaattgtggacttccactacccgggccttgatgaagtggagcagctcgctgcccacgtcacgggcttcaaggtaagccaccaccgtttagaaatttacggcgtctgccaagagtgttcgaaaaaagaaaatcattaaaaataagctgaccgcacgaaacggtcagcttattttatttcgacattttctttttattataagactcatcaaattcttttccttctaatcccttatctaaagtcagcggctctcggcaatgcatgcacatatcgactcttcctaaaacctttgtctctttatcacagcctggacaaatgacgcgaaccgctttagtcgaaagcattccgatccaaaagtaaactaccgtgctgagaccgatggataaaagcccaagtatcataaacaaactagaaagcaaaactgactctttgaaaaagatcccgatgtacataatgataaacccaacgaaaaccaaacttaacgcaaatgttctgattttattaattttgctggagtatttcgccatgtccatccccctctgttttaactatagcacaaacccgatgggattttcttcatgttttcggttgaactggaatttacatatggagagttactgtgaaattgtttataatagttcaatgtgtttagaaaaaaggaatttcgttttaaccatagaattgaatcaaatagagaataaaaaaatttgaacaattgcattggaggaatagtgatggaaaatcttctccgtccaatttaccaagaaagagcaagtcaccccaatacattggctgtcattatgattgagagaagaaacaaaacatcttccttaacagataactttgatgcagctttgctggtgattgtaaaggatgctgatgagccagtttttataaagcattatgaatttgatcatcaaacagcttctttgcatgtggtaacagattctcagattcaagaatggattttgcttggaacaaatagaagaatcatagattggattgtaaatggcagagtcttgtttgaccgtaatgaatacgtagttgaactgattgacaggctgaatacatttccgtttgccgaacgtaaactgaagatcggactcgaatacggcaaattaatcagaaggtatgttgaagggaaagctttttttgaagccaatcaatttttagatgcctacaatgccgttgttcatgcgctgcatcatttagcacgtattgaagtaatcgacagaggattccatcccgaaaccacggtgtggagccaagtgcgccagatggagccgcaagtgtacaagttatattccgagctgattgaaagtcacgagagcctggaaaaaagacttgaattattattcttagcaaatgattttctcatccattccaaagccgagatcggttcggcgcatcttttcgaagtaatgaaagaaaaagacatttggcaattcggtgagcttcttcaacatcatgacctaaagcactttacccaagatcttggcgttatgcttgattacttgacagaaaagggacttatcaacgtctgccagatagaaacgaaaggacaggctgtctatcaccgaggatattcttttaaaaaaggtgttgactctgattcttgaccgtgttatattattaaacgtcgctgatgcgcttctgagaaaacaagctcacagcggcgggaaaataaatcaaaaaaacatttgacaaaagaaagtcaaaatgttatattaataaagtcgcttcaacaagaagtgaaaatgatctttgaaaactaaacaagacaaaacgtacctgttaattcagtttttaaaaaatcgcacagcgatgtgcgtagtcagtcaaactagggcctgcacgacgcaggtcacacaggtgtcgccgcaggaagcggtggacttaacctgtgttccatttatcggagagtttgatcctggctcaggacgaacgctggcggcgtgcctaatacatgcaagtcgagcggacagatgggagtgcatcccgcggtgacacctgtgtgacctgcgtcgtgcaggccctagtttgactgactacgcacatcgctgtgcgattttttaaaactgaattaacaggtacgttttgtcttgtttagttttcaaagatcattcaataatggagcgggtgatgagaatcgaactcacgacatcagcttggaaggctgaggttttaccactaaactacacccgcgtggtatcttatatggcgcgcccgagaggagtcgaacccctaaccttttgatccgtagtcaaacgctctatccaattgagctacgggcgcttatgagcgacttaactatcatactatcatttgatgttgaagtcaagaagttttttaaaaatgttttccgaatgtttttcaattcgacttttcttattatacacatttttaaaatcttgtaaacaccttagaaaaacttttttgtttttcgttttgtttcacgctgttcatcagcgacgtttaataatataccatgcctgttttatttggtcaacacttttcctgtatttttttattttcttctttcacgccttcccatgcttatcatgtatatattttatctcatcttacaaataatataagaaaatctcttaagaagaaatgaggcgtgttatgtattactacaaagaggaactgattaatatcattaaaccggacaagccagacccggcagctgctaaggtcctgcaggagatattaggcggtcattacggagaaatgcgtacaatgatgcagttttttttccaaagctctaatttcagaggaaagcagaaacagtaccgcgatctgcttcgcggcatttttttagaggagattgcccacgttgaactggttcaaaacacaatcaatgctttattagatgaatcaggcggtgaaggtgtcggcagtcaaggtacagatcaagcgccacttgatgaagcggttaaacatgctaatcctcatcattatattattggagcgcaaagttcccttcccgttgatgcagggggcaatccgtggaacgggtcgtgggtgtataaccacggaaacttaattactgacctgcttgataatctgcttcttgagtcgacaggtgtgctgcaaaaaacaagaatttatgaaatgagctctaatcagacgttccgcgaaacacttgcttttctgattgtacgcgacaatgctcaccagaatgcattcgcgaaagcgctcgagacattgggcgttgagtgggcgaagctcctccctgtaccgaattatgacattaataaatatcctgagtgcagaaagtatgtcgaattaggctaccataatgcacagtttaactttaggttggatgaaacgagaatcggtgaaatctatcaagggaaatctccaagccgaaatggcggagagttgcaagtaatagatcctccggcagggtttcccgtaccagtgcttcctgaaataccaaatgaacacagtcctgggttaggcgatatgaatgcttaatccagtgggaaggtgctcaagaaacttcttgagcaccttcttattgtacattactgattcattcaacgattggcgttaaagaatcaccattccatatttctcccttgttgagtgtccagctgtcatgatataaagctgaagcacccttgtttactgctgggctccattcatcattccatgccagaaagtaaatggttttaggatatttttgttttattgcattgatgaacaggctgtaatcgaagctgccgtttgctgtttgcgggccgacttctgtaaaagcaaatggtttattaagcgctgttagctgatcgtatccattgatcgagtaggcatcttgaaaatacgcatctaatccgacaatatccacgtaagacgcgcccgggtaaaaatcagttttaaaatctcggttggcgtcgggagagtaaacccaaatcaaatgatcaagtcctcttgtgtcggtcatataatgatagattttcttgtagagctgtttatatagagagattctttcattatccttttggttatatgatgtaagtccccaccaaaaccattcgccgttcatttcatgcagcggcctgaacagaacaggcacaccttggttctccagctcttgaagtccgtcagcaattttgctgagcatggcatttagccgttttccttctgctgttgaagaatctagtatttttttatactgatcgtttgtaatcggtgttttaaaatgccctgactgaaaagcagggttcgccaggtgcaaactgatttgcggaattccgccatttttccaatacgacattaaattaccgttgcagcttacatctattgaatcttcaattttagctgtttcaagccaccctctggcataatcgcagccgtaaatagcaggcgattgcccggtggcgcttcggattctatcagcctcagccatagaaaatgtgtcatgactgtaacctccgaacgctccggaaaggactctgttttccgttcggttcggcaggtgtgcaagccagttcatcactgcttttgttgtctgctgggcattaggattcacaggcgacacagtatgcgcttcaattggttttgctaaaacagcagacgcaagtaaaaatataatgagcaaagagatcgtatgtttcttaaacaaatgcaactcccccattcattaaggatgagatatcatgaattcacatgttccttctattgaaaactcgccaaaatgcgcaggcaagacaaagtgtgagcctgcattgcattcatactgaataccattatttatgattcgtcctgatccgctcagaacactccccagcaaataggtttgatgtgaaggaaaagcagctcggccgctaatcttccatttgtacactgagaaataatctgattgcacataaacaatgatctcagcgttaccaacttcttttacttccggtgtatgcactttatcgatatgcggtatcgttatgacttccatggctttttctatatgaagagttcttttttggccctggtcattacagcggtcataatcgtatacgcgatacgttgtatcagagttttgctggatttcaaggacaagggttccctcacataatgcatggagtgtaccgcttggcacataaaagaaatctccgggcttgattttgattcgcctcagcagcccgttccaatcaccgctttctattcgttgtttgaattcctcctttgtgcttgcgtgatgtcccaaaatcagttcggcgtcatctttgcaatcaatgatataccagcactccgttttaccaaggtcgccattttcatgcagttttgcataatcatcatcaggatggacttgcacggagagatccatattggcgtccagcagctttaccagcagcggaaacaccttaccatccggaaacccgaatatctctgggtgatcttgccatacttgatctagtgtctttcctgccagcgggccgttctttacagccgacgggccatgggcatgtgcagaaacggcccagcactcacctgttttttgtgagggtattgcgtagccaaaagcgtcacgaagcttcgtccctccccatagtctttctttaaagacaggctctaaaaataatggatgcgtcatgatcgcacctccccggatgctgcctctgcttgtaaggcctgatgcgctaaaactagcgtgccgatgattccggcgttactgcctaaacgtggaggtacaatataatcacttatatcatctgacaattcagaaaaatctaagtagttgttcatgattttcggtacatattgatagatataagaaaacacttgtttctgttgcatgacgccgccgccaagaatgatttttttaggtgcaaggatcaaaatatactgagccagtgcttgggcaatatagtacccttccagttcccagacttgtgctatacctgataaatccgcggctttttttccccagcgcgcttcaatggcgggaccggaagccaagccttcaaagcaatctccatgataaggacacttcccttggtatgcgtcatccgggtgcctccggatataaatatggcccatctctgggtgcgacagcccctgaaggagcctgccccctacaattgcgcccgcaccgatgccagtaccaatcgttatatacaggcagctgtcgagacccttcgcttcaccgaaaaggaattcacccagcgccgcagcgttgacatctgtactaaatccgactggaattttcatttcgttcttaacagtttgcaaaaaggggtagtgtctccagcccgctttcggcgtggccataatggtaccgtatgtttgactggttttatcgttatcaacggggccaaaggagccgatgccgatcgcctgtaatgaaaattggcgaaaatattgaatcactttctctatcgtttcatccggcatctttgtagggaattctattcggtcaatgattgttccatcttctttaccgacagcacaaataacctttgtgccgcctgcttcaataccgccaagcatgcagatggcctccttgttgtctccgcaatcagcgccgtatgtttacagaagtcacaacaaacttgtcatgccgatgacgtgaaaaggaatattcaaatggaatcccggtatctaagaagcccacatgttccacttcaagaattggatcatcctgtttacagcccagatgctgctggtcaatatgatcagatttgcaggctctgattttccgatgcgttccggcgattttgagctgcagcacatttgtaatgtgattgtagatcgaatcatgaaggacatcgtcattaatgcccggtattaaatgagtcggcatatatgttttttctaatacatagggttcaccttctacaattcgcagccgaacgacataataaaccggtgttttctgatcaatagacaaatgggcggccacttcctcagtgggaaattgcacttcaaactgaatgaccttgctttggatttttttatctttcagcaagttggtcaatccgagaatctcattgctgactacatgtacatggtcatcctgtattgcagattgaataataaacgtgccatggcctcgttttctgaacagcagaccctcggcaactaaattatccaaggctctcttcatcgtcatgcggcttgagttaaattcttttgcaagagatacttcatcaggaatgggctgatcgatcggatatacgttatttttaattctatatctcatttcatttgcaataatttcgtatttattcattggcatcctccggcagctgttagagtctgatatcacataagcttttacggatatcataagttcttttccctatttcatcaatgttgcggattttcgtcatctctattcgttatgatgattgccggaagatcttggcctttaggaaaatctagaaaccgctatgttcagcaacctttttaaaccattttccgctctttttgacggttctttccccgtctttctcaagattgactgatacaaacccgtatcggtttttataggcatttgtccaagaccagttgtccatgaacgtccataagtgatagccttttacgttcgagccttcctgtatggcgcggtgaatccatttgaggtgctcttttataaattcaatccggtaatcatcttgaatgatgccttgttcatccctgaatcgctcttcaccttcaacccccataccgttttcagagataaaacactcgatgttgccgtagttttcttttaaattaattaaaatatcataaacgcctttttcatagatctcccagccgcgatgcggattcattttgcggcccggcatgacgtagggatcaaaatacctgtcaggcaaaaaaggagcgtcgggattcggaagatgttctttcgctttcacacgtctcggctggtaataattcactcccaacaggtcaaccgtgttctttttgatgatgtcaagatcttcagcgttgtaatcaggcataaagccttcatgcttcaaaatgtcaaccagctcttttggaaattcgcctttgacagatgggtctaaaaaggatctgttaaaaaacgcgtctgcgatttccccggcttttacatccgccggatggctgcttctcgggtatgatggggtcaaatttaaaatgattccgatttttccgtcctgctccatctccctgtaagcctgaatggcgcgggcacttgacagcatcgtatgaaatccaacctggacggcctctttaaagtctaccttgtttggataatgaaaatcatataggtatccgccttctacgggaacgattggttcattatgcgtgaaccattttttcacccggccgccaaacaaacggaagcaagttcttgcatagttttcatacgcgtcaaccgtctctctgttgacccagccgccgattttttgaagcgccatcggcatatcgaaatgaaacaaattgacaaaaggttcaattccgttagcgattaactcatcaatgacattgttatagaaatttgcggctttatcgttgatctcgcccgttccgtttggtattaaacgtgaccaggaaatcgacatccggaacgagttgtggccaagctccttcatcagcctgatatcttctttatagttgtcgtaaaattgggatgtgtctgcggggccgacatgatcaaaaaaacgatgcggttctttttcaaaccaataatcccatatattctggccttttccgtctctgtcggcggcaccctccgtttgtgttgctgaagccgatgatccccaccaaaaatcctttggaaaacgatattgttctgtttgtgccaagtctctctccccttatgtcacatttttatgctgttatcattttgctgagcagctgtctcctgcacagcctgttctttttcttttgccagatttaatttatccattgcttttaggaacggaaaccagatcacgaagacaatcagcagattgataagctgcatcacgccccccatgattgagttcgtcgccatgatgccattaatgaacaatggaaccgtccacggcactgtcacaccagtcggaggcggaacgagcccggctgacatagccagataggtgacgagcgtaacaaccatcggtgccagcacccaaggcacaataatgatcggattcatgacaatcggaagcccgaagataatcggttcgtttacgttaaaaataccgggagcgaggccaagttttgatacttgcttcatctgcctgcttttcatgaatatgagaatggtaaacacaatcgcaagcgtcatcccggttccgcccatccctactgtataaatctccataaacggttttgaaataatatgagggatttcttttcccgccatgtaagcagaaaggttttctacctgcagtgtattccaaatcgggtccatcacggagttgataatgatctgtccatgcagtccgaaaaaccaaagaatttgtatgaaaaacacggcaatcagcgttggaatgataccgcttccaagtccgacaagcggagcctgaatcgcgtgataaataacgtcgtgcatatttgttttaaaaaacagagtcaccattacgttaatcaacaaaaatacggtcaatgtgataaaagccggaataagtgcggcaaatgattttgctacagcaggcggaacgccggctggcattttgattgtcaggtttttttgaacgattcttctgtaaatttcaccagaaagaaatgccgtaatcatcccaagaaacatcccttttgcaccgagacgatcgaccgggataacccctgtaatggcatctcctgtttctggctgaatgataaatggcgttaagagcaaaaaggaaaccaaagcgatcgctccgccaaatacagcttcgacctgatagctttttgacaggtaatagcctatcccgaacacaacaaagacagacataatgcccattgtcgccgtggaggcaatgccgaaatgagactgaaacgacgtaagcattgaggcgttcatgattttgtttagaaacggcaaattcgttaacacaacaaaaatggacccgaatatcgtcagcgggaaagccagcataaatgcatcacgcaacacttgcaaatagcggttattgtttaacctccctgcaattggaacaaggaattggctgattttctcgaacaccctatccaccccgattatttatagattcttggttttaaagagatcaagcatctctttcactaattctttcatggataatgttgacatcagatgatcctctgcatgcataagcagcaatgaaaaagctgttgcttctccgccggattccttctgtatcatttgaaagtgaatgtcatgggccgcggataaatcctgctcagccttggcaatgagggcatcagcctcgtccttgttcccttctttgtaggcgcgcagtgattgtatgatgcagctgcgggcatttccgctgtgcaggattagctgaaaactgatttgctcgtctgttaaattcgtgattttcatctgttccattattgattcaccattaaggacaatgcctgctcatacgcttttttcccatctgccattccgtaggccatcatgtcaatgacttcaacccgaatgttgtattgatccgcttctttttggagttcgcttttcagaaagctcatttgcggaccgatcaaaacggcatccgcttttctcatgtcttcttttgctttatcctggccaacagaccaaatctctgcttcctcaccgatagactgtgcgtattccttcatttttgtcaccaataaactggtagacattcctgaactgcacgcgagtaatatttttttcaactgctatccccccttgtgattaaaacgcttacatggattattatagtcatttatttttaaatgtctatacttttgtaaaataaatataatcatatgcttgtccggttcatcattttgtaaatttttctatggaagattcattcataatgtggtacactcatcaacggaaacgaatcaattaaatagctattatcacttgtataacctcaataatatggtttgagggtgtctaccaggaaccgtaaaatcctgattacaaaatttgtttatgacattttttgtaatcaggattttttttatttatcaaaacatttaagtaaaggagtttgttatgaatttcaaagttttcctgcttgcagcttctacgattgcagtcggattggttgagttaattgtggggggaattcttcctcagatcgcaaatgatttagacatttccattgtttcagccggacagctgatcagtgtgtttgcgctgggatatgcagtatctgggccgctgcttttggcattgactgcgaagattgagcggaagcgcttatatctaattgctttatttgttttcttccttagcaatcttgtcgcctatttcagccctaatttcgcaacactgatggtatctagggtattggcagcaatgagtacagggctgattgttgtgctttctttaacaattgccccgaaaattgtagcgcctgaatacagagcccgcgcaatcggaattatttttatgggattcagctctgctatcgcattaggcgtgccgctcggaatcttaatcagcgattccttcgggtggcggattttgttccttggcatcggcctgttggcactgatctccatgctgattatttcaatcttctttgaaagaataccggcggagaaaatgattcctttccgggaacaactcaagacgatcggtaatctgaaaatcgcgagttcacacctcgtcacgatgtttacattagctggccactacacgctttacgcttactttgcgccgtttttagaagagactcttcacctgagctctttctgggtcagcatttgttatttcctttttgggatatctgctgtatgcggaggccctttcggaggagcgctatctgaccggcttggttcctttaagagcattttgctggtgaccggttcctttgccatcattatgttcttactgccgctgtctacatcgtctatgattttctttttgcctgtcatggtgatttggggtcttctgagctggagcctcgccccggctcagcaaagctatttaattgaaattgcacctgattcgtctgacattcagcaaagctttaacacatcggccctccaagtcggaattgcccttggctcagccattggcggtgttgttttggatcagacaggtactgtagtgtcaacagcatggtgcggcggatcgattgtgatcatcgctgtcctgtttgctttcatttctttaacaagacctgttcaaacagcaaaaaaatcctccttgtaaaaggaggattttttatgatttagcagaaagctcatcttcggtgacccatttgtggtttttcactttttcgccgcttgttgtcgatgtatagtcaaccatgtatacagttgttttttccgcggaatcgatctcggctgttgctcctttcatgcctttcatatgagaagcctctaaaatcacctgatctccgggttgtaacgttttatctccggcatctttgatttcttcttggatcacccatttgtgatgatccacacgctgtcccccattagtcggagtataagaaacaacatacgcagttgtatcataggcgcctgttaccgtagcttcagcacctttcatgcctttcatatgggaagtattgatgattacctggctgcctactttgtatttcggatttttagattcctgtaatccctctggaacgtcagctgatccggaatggtccatctcttcatgtgttgaggagtctgaatgattgtcatgtgtgctttctttcgtactgttgttattgccgcatgctgataaaacaaaaacaagagataacatcagaattcccagtgcatttttagagattttcatgttcattctcctttgcttcatttttttcctgtaacttttgcccgcagacaatgaaaacatgccctctcgataatactatacccccgaacggtatgtaaatacgctgatattctcataatgcgttcccgcagtttgtcctattcccctttgtttgcaaagccaaacataaaaaaagccgctgtcaggcggcatttattgatttaagacttttatatacacacctttttttgctttttgataagcggcctcccccattttcctcaccttttcagaagcatctgaggatttgatccattcgtcatcaagaaaaatggatggatcgattaggcgcattttcttcttttgatggaaatcgtactggatgtcatcttctattacttgtatgccgggatgaatagatgtaagcaagctcagaacttcttcattttttgatgcacgcaggatgttcagtacctcttggtccgttttcagcagatcctctgcggatatgacatcatgccgcagcgctgccttcaatgctcgcgctaaatactcatatccatatacattcacgggattcaaaaagaaatcaatcacttccttgtagtacacactgacaaaccattcggcagcttcaatactatcaggaaacatccttccgtttctcacaataagatgatccaaaaaggtttgcgcttcgtgcaggttaatgtgtccatatcggtacatatcacgcagcgtatagtctgtccgatcagcacacagctccggtgcgggctgttcgagcaatgtccactttgaatcgtcagataaaagttcttcagtatgatagctgtgtttttgtagaatgtccgggatttcagagtgaacaatgacttgttgaaagatgttttcatgatagtcttctgcttgattttcaaagacaacgtcaaccacatgagaaaaagctgtgtgtgatacatcgtggagcagacctgcaatctgttcttctatcgttcctccgagctttttgatgaggagcattacgccgatggagtgctcatacctggtcacattccaccttcgattgactaaaaagcttgctccgccttgatagatcccttttaatctttgcacaggcgcgcttttgataagctcttccagcactccgtctatatggtggtgcccgtaaataacatcgctgatttccatgccgtcacctcaacatctattttttttgttatatattgtttatattgatagtacatatgcaatctttcaatagaggagtgttatgatgatgatcatcccaaacaatgagatagcgaaacagatgttgatcgatttttttgccaagcattggggtacacccgagatggcgatttccagcggcatttttcggtgtgatgaattagatggatttgccgcagtaaatgaaagcggcgaaatcattggctgtattacatacacaatagatgggaaagattgtgaaattatttcattagatagtatgattgaaaataaaggaatcggcacagctttactccagcaggttgaagagacggctaaatatgcacattgtcaacgaataaagcttattacaacgaatgataatgtacatgcgatggcgttttatcaaaagagaggctatcaattcgccgcagtgtttccgaacgcagttgaaaaagcgcgccgactcaagccggagattcccgcggtggctgaaaacggcattttgattcgggatgaaattctattttcgaaggtaattgattaaacgaataggagtctttttatgtccagtcattataaataccctctcattttcacggcattcccattaatcgctttctgcttgatctttttttcctatcacctgattcatcatgttcgtttggagtatccgaattggcagggagaaagcaaagatcagaattgggaagctgttttcacaaaaaatgaagatgcaccgaatgaatacagcggcgaactttattggatcggtgaaccacatgaaacagacaacacttatttggaatcactgattgtaaaaaaggatgatgaaattctgctgagttctgacacggaaatcccgatgcatgattattctggaggcactttttctgatggaagcgcaaaagaaaagtccgtttcttttttagagcggttagatgaacatgagcttgaaggccatgatattacgattgaagtgaaatggaaacaaggtaatcattattctgcgagccagcttacgctcaatgaaaagaccttgtttgaagaaaagcagcaatagatgatcaaaacgaaaaatagacaaatgaaaaggcgtaacatattttatacagctcatatgttatgcctttttccttcattttcgccaaaaagtggagcagtctgccttattccgaatattaaactcaatcattttctcaagtagcgtgtaatcaactggatcgttccaagggatacgtatcagctgctcggtgtagtcatatcctgccttcacaatatcatcctctacgtgcgctatcgttactttttcaggagcgacagctaaatgccttttagaaacactaaagccaataataaatgtaccgtgatccgtaaacatcggttggttccattttatttctgtatgtaaatttggatatttattttttatccaagttaacacctcttctgttctttctcggtggaacgggtcatcaatccccgctaaatactcagaaaaaacgtccatgttgttccctcctaaaataaaatgatgccactccatatgaactgctcagacatgtacttacacaatacctcttccaacataatacttacaattgttcaagatgtaagcgggttgcttctatgcgactatagcagatttcagtccgcctatccacggccagtatctattcctccaatttatttctatagtactatcactctttcctttctcttgatagcagttcattattcttgtaaatccaatctttaaaatcgattaatactagcttaacagtttaaaaatataattgggttgtcattgagattcatctatatttaggaggttatccagttgaaaaaattcccgaaaaaattactgcctatcgcggttttatcatcaattgcgttcagcagcttagccagcggcagtgtgcctgaagccagcgcccaggaaaagaaaaagggaaaccaagacgaaattaagaatgttattgttctgattggtgatggtatgggtgtgtcttatacgtctgcttatcgatacttaaaggataataaaaagacaaaagttgtggagcctacggcttttgatcagtatcttgtcggccagcaaacaacttaccccgatgatcctgaacaaaatgtaacggattctgcagcggcggcaacggctatgtctgcgggaattaaaacatacaataatgccatagcggtggataacgacggatcagaagccaaaacggtgcttgaagctgcgaaagaaaaaggaaaagcaacaggacttgtggccacttcagaaattacacacgccactccggcctctttcggttcacacgaccacagccgaaaaaatatgaactcaattgcggatgattattttgatgagatggtcaacagcaagcacaaaattgatgtccttctaggcggaggaaagagcaattttgaccgtaaggaccgtaatttgattaaggaattcaaaaaggcggggtacagctacgtggatgatcgcaaagacatgctgaaaaacaaagacagccaagttctcggcctattcgctgacggcggcctacctaaaaagattgaccggacgaaggatgttccatcacttaaagatatgacaaacacagccattaaaaaattaaacaaggataaagacggattcttcctcatggtggaaggcagccagattgactgggcgggccatgacaatgatatcgtcggcgccatgagcgagatggaagacttcgaacaagcttataaggcggctattgatttcgctaaaaaagacaagcacacattggttgtcgcaacggctgaccactcaaccggcggatattccatcggtgcggacggcatctacaattggttcagtgaacccattaaagccgcaaagcgcacacctgactttatggcagaaaagatctctgacggcgcggatgttgaaaaaacgttgaaaacatatatcgatcaaaagaaattggctttaacaaaagccgaaattcaatctgttgaagaagcggcaaaatcgaaggaagtactggatatcgataacgcaatcgagaacatctttaataaacgctctcacactggatggacaacaggcggacataccggtgaagatgtgcccgtctatgcatacggtccgtctagtgagacatttgccggccaaattgataatacagaaatcgccaaaaatgttttcaaggctttacaatacaacattaagattaacgataagtaaaagaatacaaggtgtcccgttgcttgtatgaagtaacgggatctctttttaatggaggaatcatcatgagaagaattctttcaattttcgtttttgctatcatgcttgcgggctgctcatcaaacgccagtactgaaaaacagcatgcaggcggggagaaaacagtaaaagctgagccgcaaagcacttcatcccagaaggacagcacagatgattatcagcctaattcccaggtaactgatgaccggtcattgcttaaggtcggccaaacgttttcagatgataaaggaaaagctgtcttaaaagatatcaaacaagtgaacaaaacctataagattggcgacgtggagttaacggtaaaagaaatgaagctgatccacttgcgcccggactacagcatgattgattactttcatgagttaacacacgatgaagagtttgatttcgttaaggtcttcgttgatatcaagaacacctcttcaaaaaaagtaaatgttgcgccgattgcattgatgaaaacaaatacgggcgaaacctttgattggaacaaagatatttatcttgaagagttaaacggcgaattggaaggtggcgccgaaaagtccggaaatctcggctttattgtgaacgcatcaagcggccatgctcatgataaggccgcggatgctgagaagaaaacaaaagagatcaagtggatcgaaatcacgacaagtgacgtctttgaccataaccataagaaaatcagtgatgctcaaaaaatcaaaatcaagttttaaatcaagaactcccgtacaaggtacgggagttctttttcttatttgtttttttggcgaatcaactcatcaatccgctccatcacttcttccatgtccatacattccttgaagctttgattgatttttttaatgcctgccgtatactgatggttgcgcaaaacctcatctacggcctgttttaatatttgggcattgacttcatctttagagatgacatagcctgcatggagttcagagagacgctgcgccaccatcggctgatccttgtcatgaggcatgacaaccagtggcacgctgaaatgaatgccttcgtttacgctgttcattccgccgtgtgtaatgaaaacatccgattgctccagcacttccagctgagggacatacggagcaatgataaagttttccggcgcctgctttaatttggtcaggtccgctttttctccggcagcgatgacgacttttccgttaaagcctgaaaatgcatcaatacaaaggttgaagaaatcctctgtatgatccagtacagtccccattgaaatataaatgacactctcatcttttagctgttcaatcgggaaatctgttttttccgctctctttggaaagcttggcccgataaacagacattcatccccgaaacgatcactttctggctgaaaataacggcttgtatacactacgttcaattcccctttattgttcatgaattgaaccaggtttttcggggcaacaccgtacgtttctttcatttttgccaaaagatcttcacactcttgatccaattcaagcggcgctccagactccggatgcagcggcaggattttcaggtgctcctcgccaaacaagaaagacgccgatgaagagactcctggaatatctaagtaatcccttaccaattcccccgcgccgaatttatcataataaacaaaatcaaattgaatgctcttagataagtctttgacaatctgtaaaatgtccaatgacgttttgatatggattttcacgaaatcaagaatgccattgggcgaaccgacatgaataggtgtcgttcgcagcagatcccggtgaagatggaccgttgctcccgctgcttctaatcgttttttatatttttcagtggatatataatggacatcatatcccttatcggaaaacgcttttgtaatgcctaaagtaggattcacatggccttccgcaggaaaattcaaaatcaatactgtcttcatgtagacaactccctctcaaatcgtattcgactctttgtttgatcagactactactaatcgtaaaatgggaacacaacccatgcaaggtacaaatgaatgaactattctgctgctctggacttaatcaaaaaaaaagacaccccagctatggtgtctttttttacacttttctgatcgtaaaaaatttccgcagaagccatgggcccggcgtaaagcccagcgttaactgccaagcgccaatagcctgcaatctgtattcacggacgatctgcatcttccggctcatgcttctgacatcctcaaaccatacctcatgcgtccgcccctgctgatcactgtaccggaaaaacggtgattgatattcggctgaatattgtatcggggcttggtacctcatcgctctttcgattgcattttgatttgaaatcgctgaagcaactgtgcccggctggtacgggatgatccagtcgtacccgtagagcgggactccgataatgatttttctgctcggcacctgcgcaatcgtaaactcaatggttctccttatttcagtaatcggcgctacaggacccggctcacttcccgcatgatgccaatcataagccatgataaacatataattgacaaccgctcctatccccccgtaatcgtagcccctcagccatggaatattatcacttgtttttgcaggaacagctatcgtcaacacataccctcccgcctgaagtcgatctctcagctggcgtaaaaatccagtgaaaagatcgcgatccgcggcgctcacctgctcaaaatcgattgtgacaccgccatatccccttgtggaaactaagtcataaatgttgttgaccagattggttctcgctgtcggattgtttagcacttggtgaacaatctccgtactgaagcctcctgatgtaaggttcgttattgttgccagcggcgtgactcgtctttgccaagttgtctcaatagcggccgcatcattcaattggtttgcaatgtcgccgttcggtgcaatatggtattcgaaaattgaaatcgaagacgagtatggcgcataatcattgattaattctcgatcgaggtctgggtttcggagcacataaaaacttaacgttcccgcaatgtaatttgagatcgaaggaatcgttatttttgctcccacttgtaaagcatttgggctgatacccggattggcggctcgcagtcgctctaatggcacaaacgctttggctgcaatggcggtaagcgtatctccaggctggactgtatatacataaagagggataagcagagcctgccccggcacgatattcgtttcatctaaaccattcacaccccgtatttgatcaacagaagcaccgtatcttctgcctatcgaaaacaaagaatcaccaggcccgacgatatggataaacatgtttaacccccattattcgttagtcaaaccatcataaaatcttattaacggggcctcttagatatgtggtgaatacataaaaaaataccaagggttctgctcccccttggtaccggatcatacaaatcaattctcttttccttcttcaagcacatgcttcaaatgctcacagtcatgattgaaatgagccagcacatgctgtttggctgcttctttgtttttctttttcacttcttcaaatatcctgcggtgctcacgcagtatcgtttctgcacggtggtcgccggtataattaaggattctgcaaaaatgaatcaggtcatttacatgctcaagcaaatttttcaaatgtctgttatggctgaaatcaaccagcagctcatgaaatttttggtttaaacgaatgatttctgtatcttccgtgccgttgtgaatcgctttctctgtttcttcaagctgtttttcgagtatggtcagctcttcttcgtccgcttcgtctatgactaattcgactgccagctgctccagcggaattctgattttataaatctcatctacatcttttgccgttaatgacgtgatcgaaaatccatttcggtcatccgcttttaacaaaccatctttctcaagcaatcgcatggcttcccttatcggagagcggctgacgccaaagcttttcgccagctgtgtttcgtttatccgttccccaggcttaaaagtcccgttgaagatcattttttttagctggttataaaattgcaggtagtagggagtcggcttatctaatttaaaatcgtccatatataatacctcttttgaatatattcaagggcttttcttcatcaaaatcatataacagatggtaatgggaagcaacaaactgccttgtcagatcccagaatttgaggtacgatatgtttgctgaacgacggtcgacggactactggcaactgaaaaaacggcgtgtttttcttcgtcaataggacaccatacctccgccagaatagcacacgattacatttttacatcttttcaatggaggaaaaaatatgctcattattcttgttatgtttcttctaggaattattttaggctttattggcgccggtggagccggctttgtcattgcccttttaacgcttctttttcatatcccgattcatacggctttaggcacttcgcttgccggcatggcttttacaagcttatcaggggcatacagccactatcgcgagggcaacattcaaatgaaaatcggcttaatagtcggaggctttgctgcggttggctcatttttcggcgccaagctgacatcttttattccagctgatttgcttcattatttgacggctggaatgttatttttatcagcaattctcattttaatcagattatttattttaaaagagaaggctcaagtgaatcaaagcactctttcaacgtatacgagagcggtcatcttaggaattgtagccggcgttctttccggcacattcggcatcgggtcggcaccttttattcaaattggtttaatgattatgctgaatctgtccattcgccattctgtcggaacgacgatgcttgtgatcatccctctggctgtaggtggaggcatcggatatatcacagaaggttttgttgattatgtattgctgatcaaagttctggtcgggacaatgtgcggtgcctatgtaggcgcgaaattcaccaacctcatgccaaaggtggttttgaaatcagccatctttttgactccggcgattgcaggcctgctgttgttattctaaataaaacaaaaaacctgacgtcatgtcaggtttttttatgaattctgccctactcgttctttcgttaatccaaaaaacgccagtgagccgatgacagctgtcacaaacatgatggctcccatcggaacggctgttgtctcattaatgcctacaagcggtgacacgattgaaccgaggagcagcgggagcattccaagcagcgcacttgcacttccggcgcggtgcccctgcttttccatggccagggtaaacgtgctggtcagaaccatgccgatcgtaatcatgtaaatgaaaatggatatgactaatgtagcaagaggaccgtgaatcatggtcatggttaatagcacagccgtcgcaatcatagccgtaatgaccgctatacgaagcaggcttttttcatgaatgattccgccaaagcgtccgatgataaagctgcccgatataatcgccagcccgttaatgccaaaaagaatactaaatacctgcggagacaccccgtagatatcctggtatacaaaaggcgtaccagacacatatgcaaagcttcccccgtgaataaatccgacagttaacgcgtaccccataaaggatcgatccttcagcaggctgcccatcgttttgacggatgttccgattgagcttggaatccgtttttccggcggaagcgtttcttttaacctcaatgcaatcagaagaactagtaaaaatccgatgatcattaagacgtgaaaaattgtatgccacgttgcgaacggcaaaagcaaaatggcaccgcctgtcataggcgcaaccattggcgccaccgcggtaatgaccattaacagcgagaaaaatttagaaagctctcttccggtaaacacatcgcggacgattgcgcgagacagcacaagccctgcagaagcagtgaagccctgtaaaaaacgcgcagccactaaagttgttatattgggtgacagtgcacaaaacagagaagataacgcaaataaaaaaatacagattaatagcggttttcgtcttccctgcgcatcgctgaccggcccgacaatcagctggccgatcgtaagtccgaccagacaggctgttaaacttaactgaacaagtgaagcacttgctgataaatcttccgcgatttcaggaaaacttggcaaatacatatctatattaagcgggcccaatatagcaagcatgccgagcagaaacgctagtgccaagcgttcttttccagttggattgtgcagcatgttatcaaaccttcccttcaacctagtcccttatataatggatgtcagctccaactatggattgaagctgtgaaacatttgtatattgtatcataactttcagcctgtgaaagccgcttgagcacgggctaggcaaagtgatattcagaacacctataaagggaatgatgcggggaatcatcgtgatcagcatcatctgaagaaacggccagctttttttgctaagttctagcctagcgaattttatgcgctgggaggttgttcaaaagtgcaaatggcttgcaagatgaaatcaatcgttgtatattaattgacgtgtcaatcattgatatatcaattaatagttttgacaggaaagaagggatgggttttggcgtcattttgttcagaggaagccgagattttatatcagctgcaaggcgtgaacaaggtgattggcgtgaagttcgaggcatgcacgggcatcagccaatctcgtttggaattgctgacattgctttatcatgcagatgagatcagtcaaagcgaccttcaaaagaaagtaaatatcgatagcgcagccgttaccagacacctgaaacagctggaagctaaaggcatggtatcaaggcggcgcaagcctgaggacaaccgcatcacccttgttcggttaacagaccaaggaagagagcgaattgagtcttctaagaaggaaaaggagcgtttcatgaaggaaatgctcgcaaatgtaagcgcagaagaacgccgcctgctcattgatgtgctggcgcgcatgcgaaacaatataaataatatcgaagcttaagaggagtgtatcaacatgatcaaaacaaacgattttatggaaattatgaaaggccgccgttctatccgcaactatgatccggcagtaaaaatcagcaaagaagaaatgacagagatcttagaggaagcaacaactgccccatcttctgttaacgcgcagccatggcgttttcttgtcattgacagcccggaaggaaaagaaaagctcgcaccgcttgcaagctttaaccaaacacaggtcacaacatcatctgctgtcatcgctgtatttgcagacatgaacaatgcagactacttagaagaaatctattcaaaagccgtggaacttggttacatgccgcaggaggtcaaagacagacaaatcgccgcgctgaccgcacattttgaaaagcttccggcacaggtcaaccgtgaaacgatcctgattgacggaggtctcgtttccatgcagctgatgctgactgcacgcgcgcatggctacgatacaaacccgatcggcggatacgataaagaaaacatcgcggaaaccttcggattagataaagaacgttatgtaccggttatgctactttctatcggaaaagcagcagacgaaggctatgcttcctaccgtctgccgattgatacaattgcagaatggaaataaaacaaagagcccgggaatgttttccgggctctttgtttttaagtacagccgccgtttgatcgtctgaccttttttgggtaacacgtctgaagttcgtcgtttagtcatgagaaaagagtgatgaccattcatcactcttctctcgattattcttttcctttcttcctgccgaacggccaccagtttccttctccaaaggtcgcaatgattgccgggatgaaaagcggaagaatgacaaggccgtaaagcaagagcccgatgatgataacacttgccacctgcatcagtgtattaacacctgaaggcatcatcgccgcgaacgtaccggccaatataattgcagctgtaataatgacagatcccattttgctcattgacctgacgacaccttgctcaatgccaaggtgcacctcttccttaaatcgatccagcaagaagattgaataatctacccctaacgcgatcaagatgacaaagctgaagaatggcactgcccagctgacacccgcgtttcctaagccggttacaaaaattaattctgttatggatatcgacgtatagtacgtcagcagcaatgacgcgatcatataaatcggcatgatcattgagcggaacaaaatggttaacacgataaacaggcctataatcataatcaccattgttctggagaagtccgttgtggacagctcttttaagtccgcgttcatactcgtgaccccgccgtatacgatctgtgcatcctccaaaggagtgccgtcaacttcgtttgcgacagcttttttgatttggtttattgtcgcaatagcttgttctgagtacggatttgaatccagaacgacacttaattgaacacctttgccgtctgcaaaggaatactggtcaattgacttcttaaagtctttgtccttcattacttgaccaggaatgaatatgcctgtatctcttacagttgaacttttgctcatatcctctaacatatcactggaagctgtaataccgtcagagactttcgtcaggccctgatttgcgctcctcacaccttcggacagcttctttaggctttctgtcagcgttccggcttgtgcctgctggcctgagagctgttggttcgcttgttcaaggccggtttgaatctggccaagctgtccgcttattgccgtaagctgctgcacggtctgtgcggtattgccggtttgggaaatctgtttgctcacgagctgcagctgctgattgattttgcccaagccatctgccgcatcgcccagtgaaccgccagaccctccatttgaggccgagccggtttgccctgccatttgattcagtcctttttctatatccgttaatccgctttggacatcggcaatccctttcaccgtcttatccagcccgtctgaaaccgatcctagctggttatcaatatataaatctttgattttttcaccagtcggctgcgtaatggtcataacagagtcaacatgatcaactttctcgatcgctttgctgatatttcctagataggggattgtatcagctgttgtaagatctttgtctccttttacgacaacattgatcgggaacgcttttccttccccgaatccatccttaatggcctcgagagcttttatagatttataatcgctgctgatttccgcagttgagtcgaatgaaatctggtcatcataggtcaagatgaacggaagcgtaatcaccaccgtgatgacaatgaacagaaacggacgcgcaacggagtgtctgccgagaaacgcccatagtttgttatcactgtgtgacagcactttcttagaaggccagaataatttttctcccagcgtcaccataaataatggtagcagtgtgtagaggatgatcattaaaattcccacaccgactgctacccctactgcggattggaaaatcgcaaacttcgcaaatcctaaggcggaaaatccgatcaataccgcaaatccgctgataaataaggtttttccccctgtgcggtaagcgataagcgccgcttcttttttatcatgcccgtttgccaattcttcacggaatcgtgtaagaagcagtatgcagtaatctgttccaatgccgaacaggatcgcgactaagaaggtttgcgtaaacgtcgagattggaaaatcaacattgtatacaaggatgcccagtatggattgactgatcagataagaaaaaccgacaaccacaatcgggataaaaggcgtcacaacagatcggaacacgatcaacagtaaaccgatgatcaggcagactgtgatcacttccgttttcttaagcccttcctctgagctgtgagcgaaatcctggttgataagggaagctcccgtaatatatgccgtcaagtcatcaggaacgatttgataaatctcgtccgcaattttttccgcctttttatcagaacctgtaatcgtgacaggcatgagaacggttttcttgtctttcgacatcaactggtctttgacttctttttccgctgacagaggagatgttacctcttctacaccgtcgatctttttaattttatcgatcattatccggagctgattctctgtttctttctttaaagcgttgtctaatgtaaagacaacactgatcgaattattgtcttctcctgcttgttttaaaatggcgtttgccctttctgaaacagcatcagcgggaagctgggcctgccccttttgattggccagctccgttaagttcggagaaaacaaactcaaaacgacggtaagtgctaatactatggctgcaattgcccacttgaatttgatgattgctctcattcggcagaatctcctcctttaaatttgctttttaaaatggtgaatatctcgatgatggaatgtaagtgttcctcatctatatcatcaatcagcggtttgagcgcgttaaagatggctgaatctaattcttctagtatgtgttcaccactgggtgtaatgttaataagcttagagcgcctatcacttttttccggacagtcgccccattgaaccaatcccttttcgagcagctttttcagtctgttagagatcgcgctcttatgtacattttggtacatggccaggctgccgggagatgttgggcccttgacttttaaaattttcaacaggtctgcctgttcccttgagatatgcttgaagacatcctgattgatttcacgatgcacaaattctgtcccttcaagcaggacttccacaaacaggtttatcgcctgacatagcttttgttcattcaatatcttcccctcctcattatagtttaccccgctaaactttatgttcaatgtcaattagtttattcccctaaactatatatgtcaacaaattttattcacgagcactctacataagaacgcacgttcgtgtataatggaagctatacacacgaaagggggaattttaacatgtcagatttggcattcaaattgtatgaatataacgtctgggccaatcaacaaatattcaaccgattaaaagagcttccaaaagaggtataccatcaagaaattcaaagcgtgtttccgtcaatatcccatgtattgtctcatgtttatctttctgatctcggctggattgaagtgttttccggcaaaaacttgagcgatgctttggctttagctgaacagcttaaagaacagacagaggctaaagaaatagaggaaatggaagacctttttctgaggttatccgagcgctatatactatttttacagcaaaaagaacagctcaataagccactccagattcaaaatccctcaagcggaatcatgaaaacaactgtttccgaacttcttccccacgttgtcaatcacgggacataccaccgcggcaatatcacagcaatgctgcggcaggcaggctacgcatccgcaccgacagattacgggctctacctgtttatgaaaaaaactgaaaaagcataaaaaagcggctccctaaatggagccgcttttttcgggaaatagtccaaatcacattaaaattcttttcatcaatccttttttagtaaaaaagatagaaattttagtgttataataatcattaaaaatagattgctgactcaataaacaattttcaatggaggaacacataaagtgacagacgacatgacgaaagacaatataaatcagcaaacgttgcagagaggcttgaaaaacaggcatatccagctcatcgccatcggcggagccattgggacaggcttatttctcggctcgggcaaatcgattcattttgccggaccttcgattttatttgcttatatgatcacagggatcatttgcttcttaattatgagatcgctgggtgaattgctgttatcaaacttgaactatcactcttttgtggattttgtacaagactacctaggcgatatggcagcatttatcactggctggacatattggttctgctggatttccattgcgatggctgatctgacagcagtcgggctctacactcaatattggctcccgggtgtgccgcaatgggtgcctggcttaatcgctctaattattttactgattatgaacctggcgacagtcaagctgtttggagaattagaattttggtttgctttgattaaagtcattgccattttggcgttaatcgtcattggccttgtgatgattttcaaaggcttttccacaagctcaggagtgtccagcttcacaaatctctggagccacggaggcctgttcccgaatggcatgcacgggtttatcctctcgttccagatggttgtgtttgcttttgtcggcattgagcttgtcgggcttacagccggtgaaacagaaaaccctgaaaaagtaatccctaaggcgatcaacaatatccctgtccgtgtgctgcttttttatatcggggctcttctcgtgattatgagcatctatccttgggatgtcatcaatcccagcgaaagcccattcgtacaagtatttgtcgctgttggcatcgtcggggctgcaagtattatcaactttgttgtgttgacatccgctgcttcagcatgcaacagcgctgtattcagtacaagccgtatggtctattccctggcgaaagatcacaatgcgcctgagtcaatggcgaaactgactcagcgtaaagtgcctagaaatgctttattcttttcggctatcgtgattttaataggtgttacgttaaactacatcatgccagaaggcgtattcaccctgatcacaagcatttcaaccgtatgctttatctacatttgggggattacggtcatctgccatatgaaataccgcaaaacaagacctgaattagcgaaaacaaacaagtttaagcttccgctttatccgtttacaaattacctgattcttgcgttcctggcgtttgttctggttgtgctggcactggcacaggacactcgtgtttccttatttgtcacaccggtttggtttattttgctgattgtgatttataaagtgagaaaagcgaagcatcaataacactcgaaactcctgcctcaaaaatgagagcaggggtttttttgatgaaaatgacctttgcttttgaatttgaagatatgctatagtgtttgtaatcaaaacaagaagggatgatgggtggacaatgattaactaatcttatttttaccgtttgaaatcaatatttcaaatcaaaaaataggattagtctgcccattttctatatatacgacactgctatttataaaaaatagcttatttgatcatgcacaggcacggctaatccttccaacacatttgggaggatttttttattctccctttaaagcgagggatatggatgaaagagatcgtaacattaacaaacgttagctatgaagtaaaggatcaaactgtttttaaacatgtaaacgccagtgttcagcaaggagatatcattgggattatcggaaaaaacggcgctgggaaatctacgttgctgcacctcattcacaatgacttagcccctgcacagggtcaaatccttcggaaggatataaaactggctttggttgaacaggaaaccgcggcgtattcctttgcggatcagacacctgccgaaaagaagttactggagaaatggcatgtgcctcttcgtgattttcatcagttaagcggcggtgaaaaactgaaagcgcggctggcgaaaggactatcagaggatgcagatctgctgctgttagatgaaccgacaaaccaccttgatgaaaaaagcttgcaatttctcatccaacagctgaaacattatagcggcactgtgattctcgtttctcacgatcgatattttttagacgaagccgcaacaaaaatatggtcgcttgaggatcagacgctgattgaattcaaagggaattactccgggtatatgaagttccgggagaagaaaagactcacccagcagcgtgaatatgaaaagcagcaaaaaatggtcgaacggattgaagcacaaatgaatgagctcgcttcttggtcggaaaaagcccatgctcaatcgacgaaaaaggaagggtttaaagaatatcaccgggtaaaagcgaagcgtacggatgcccagataaaatccaagcagaagcggcttgaaaaagaattggaaaaagcaaaggcggaacccgttaccccagaatatacagtccgcttttcaatcgatacaacccacaaaacaggaaaacgttttttagaagttcagaatgtaacaaaagcgtttggagaaaggatcctctttaagaacgcaaactttacgattcagcacggcgaaaaggttgcgatcataggccccaatggcagcggaaaaacgacattactgaacatcattctgggacaggaaacagcagaaggaagcgtatgggtgtcgccgtcagcaaacatcggctatttaacgcaggaggtgtttgatttgcctttagaacaaacaccggaagagttatttaagaatgaaacattcaaagcaagggggcacgttcaaaatctgatgaggcacttaggttttacagccgcccaatggactgaaccgatcaagcatatgagtatgggtgagcgtgtaaagatcaagctgatggcctatattctggaggaaaaagacgtgctgattttagatgagccgacaaaccatctcgacctgccgtcacgcgaacagctggaagaaacactgtcacaatacagcggcacattgctggcggtatcacatgaccgatactttctcgaaaaaacaacaaacagtaaactcgtcatctcaaacaacggcatcgaaaagcagttaaatgacgccgctccttcagaaagaaatgagcgggaagagcttcgattaaagcttgagacagaaagacaagaagtgctgggaaaactcagttttatgacgccaaatgataaagggtataaggagcttgatcaggctttcaatgagcttacgaaacgaataaaagagctggatcatcaagacaaaaaagactgagggagaaagttcaagcggcattgaaaaggacaacagctgttgtccttttttctttatatttcaagccttcccatgaccttaatgtttctaatgatgacttatagtaccctgccactgcttccagataggcatcttgtgtttgggtaacgtaagcgacttttcagcatagctgttttcgcatacgaatattggtcatggcatagcccatcttctgataaagatagacggctgtctcgttgtgtgcaaatacatgtagagccagcctttccgcaccaagctctcttgctttttcatcaagcgtttgaagcgccaattgagccagcccttttccgcgaaaggctttatacaatccaaaggaatagataaacgcttccttttgcggatgaaacggatcagcatacagccagagccagcccattctttctcgttggtcatttgtgatgttccaaaaataatgattgctgctgtctcgcccattcggaatcatgttctcatatgcctgctccgatttctcaaacgcctctttttccgtccaagttcctgacgttgtgttttgtttcgcataattttgcacggacatcccgcgaaaggtttcgaactcttcctcagtcatgtcttccaaagtgaatgccatcctgtattcctcctttataaaaaaagcccagctgatgccggacgaataatgcagaaatggatctctattttaatgattcagttaattcctggactttctattattcgataagaaaaggagatttcctgcaaatgggcttgttcttaaacattagtgaaaagcttacgtgtaactccccatgatgatcatgatagaaacaatcaaacaaatcatcgctggtatcgccatgatgaccgattgtcttgctcgaaacatatgcgcatgaatggctcccgccatgagaacgacaaacagaacacctgctccaatcgctgcataccgattccaaattcccgctgtcatagcaagtgccccggctatttcgagaatgccggtaacagtcagaaaccataatggatattgataatgccgccaatgctcaacttgaaagggaacgcggcttacctttatgatgcctcccgcaagcataaaaactgccaaactgactttcatcatagtagatatcatcttacgtcattccctttcggaagcatcccgtatattaaaagattcacaacctctgctgcgaggcttgccggatctttgattccggttaacaaaaatgaatcggttaaatgttcaatcatgccgaccaaacactcagcgacagtttccatatccagttcagagtgaaaatagccaagccgctgttctgcttctaagttctctttcaaaaccatcgccaagtcttttttcatttgttttgcttccgggttgagaaaaaagccgatcttggttaaatccttgtcctcagccaaaaattgaaaaacagtctctacagctagcagtacccgttttgatacatcctccgtgtttaatccgttttccagaagaagtgactctgtcagctttctgactcgagagtgaaaatcggttattaactcggcaaagatggcttctttgctttgaaagtacaggtaaaatgaaggctgcgtgaacccagcttttttcacaatttcacttaccttcgcgtcatggaatccccgaatcgaaaattcattagcggcagctttgagtaaccgtttccggctttcttctcctttacgtccttttttgcttttcaacgaggaccacccccaaaaataatactcgcaagtaatgttactcacgagtattatttcatggcattagcttcattgtcaatgatttcaaactgatcctgtttgccagcttcctttattaaagggtctcatgtatttcgaataactgaatcaattcattgattactatattcaatggcttttcattcaactgataagtatttgccaaatagattgacattcaggctgtgacaaactttattctttttttaacgagcatcactccagggccagatagagttttgcccgcaaatgcaaggaacaattgggtgcagcaacgcataatgtactgtacagaatgatggaagggtgtgatgggatgccgtctacaataatcaacctatattatttaaagatcaacagcatttcgggcaatggttcaattacaataggtgaagccgcgcataacagccataccgcaaataataaatcccaagggatcaactcctctttcggtgatacatcacctgcagaatcaatcatggaaaacttcttaaatgatcctgatgtcaacgatcagacagaactcggaaactctgatactaccaatatgaatgctcctccgcttccagtaccgccaattttagattaaaaggagtttcgctatgccataccaaattaacatcgcaaatattaaggtgaacggcgtcacacaaaacggaaatattgatgtcggtccaaccgtacacaacagccatacagcgaacagcaaatactttggggcaaacttttctctaggggatttttcgccttcttcttctcttttaaatactgggaacctcgatactgatatcagtgatcaagaccaaattggaaacccttctgcaccgatttcaaaccaaatttaaggaggatcctagatggatctcgaaaaaatgagaaagtggcttgagattacaaatgaatataagcaaaatgacttttggacaaatgtgctcaagtataaagccccggaacaattttttaataccaacacctatacgctcgtttacgacttttatcaagatgaagaagataattttatcattgtggaaatgcccggtgtgtatgaggaagaattaacgatccgtttactatctaaaacccagctgctgatcaaaggaacgatcacgcctgtttttccagccgaaatggaagtgctgcgtgaacggtattacggagaaattgagcgaatcattcagcttcccgaagccactgaatctcatttgttacagattcagctgttaaacgggcttctgcacatttcgtacccaagacaagttggaaccattgcgttcaataaggggctttaagattgattttccttcattccttatccatagggactgatatatggtctttatattgatccacataaatatccccattacccagcagcactgcgtacacggtctctttcacctttatgtctctttttcgcaattcctccaaaagccaggattccgtcaaacgattctgctttaaattattctcaatgatttctccgtccataataagctctatcggaagcctgtgttcttggtttaccgcaatcattaaatcctgtttggtcacatgccggaattgcggttttcttaacacagtcagctgaccattcgtttcaagaatggcaaaaagaacttcttcgatattaaatatttctttttcccgtaattgctgatttaaataatcaagtgtgtaacgcattttcctcatatttgattcaagtatcttcccgttttgaatcagcactgttggatctccggcaaaaaatttcctcagcttcctgttctttatcgacagaaacgaaattagaaaaatggttagcacaaaaatactaaacgaaatggcaatattgtgcggttttattgaagtattgtaagctaatccggcagcaatcgcccctagtgtgatcgccgcaataaaatcaaaaatcgtcatttgagagattgtctgtttgcctaaaattcgttctgcgattaacagcaagccaaagctggcaaccgttctaatgacaacttcaagttcaatcatgttatggcgctccccgcttcccagattgtttcggccaaaagactcctgctgctttcattgtttggcttaatatatccatctataccaaaaatattgttcggttcaggacagaatgaaccaactgcctttcggatatattaaattgcgattggccggaaggaaagccagtcccatgacaaatctaattcatcattggtcaggtggtagcatgaatttcacttgggaatctcttgttctcattgtagccggagtcattttgctgagagtttcaggaatgaaatcaatcgcacaaatgacttcaactcaaacggttgtcatgatttcaatcggaactattatcgtgcagccaatcatcaagtacagcctcttcaaaacattaattgcggcggcaattttcacaataacttatagaatggatccaaatgagatcgaacttcattgaaaagatgttgaccggaaaagcaaaagttgttattgaaaacggacagcttcatatcgaaaacttaaagaagatgagacttacagttgatcagcttgaaatgcagctacggcttcacggcgttacggctatacaagatgtcaaaattgcgacattagaggcaaacgggcaattaggaatagaattaactgatgacgccaaacccttaacagtcagggatctgaaaaaactcattcacccggatttcataaataaggacggacaagcccatttgtctagcaatcagaatatttttgatgaaattggcaaaaagaataaaaaaaacatcccaaaaaaactgcattaacaggcacttgtggaattttgcaggtttttgtctctcgctgaatgtttttgccgttttgtttaagcaattgctgctcacacaccatattgtataaacagtcataacagagaggagagatgaatgatgaaattcccagtatatattcattcgatatccggaaacagcgtttttaataacggttttgcattctccatcagccctttctctgtttctaaagagacagatggttccggagggaataatacaggtttggtttttgaatccaatgctttaagccaaacaagctccgccaatcaagccctacatgttacaaatgcggtccaagaactgctttccaagcttttagcgtaaacataagaaatgaacacttcatgaggtgccgtatggcttttccaattattcacacaaacttttgggatgctgtgatagctgttccaatcatcatactgataacccaaatcctcaaaatattattgaaaatccccaaaacttttgtaccatcagttgccttaataacaggccttgtcatttctgttttcataagccatcgacacagcctcttttctggcgtatttatgggctggttttatggctacgctgctataggctcctactcatcattaaaaacgaccatcttatcctttaggcaaacgaaaaacgatacatcaaattcatagatgacatataacgatctgccgcctctttatcaggcggctttatttctgctgataggttgatcatcttcaaaagagactcattcactcgctattatttttaccattatgttgatgcaatgatataaaaacgcaatatcatagaagtaaatagactgccagcgtcctctatgacggctacttctgagtgaaaggagtttttgaagcatgcgatctcaaatcaacatctcaaatctcacgataaatggaatgacacaaaacgccaatacagatatcggacaaaacttgcaaaacagccatactgcgaacagcaaaaattacggtgtcaatttcacattaggagattactctccttctcattcaattattatttcagcaagttgtgataatgatacaagtgatcaagggcaggttgataacccttcttcgcctagtgaagaataaattgatgcaaaaaaaagaactcatttgagttcttttttttgccttatttctttattcgtcttcatataatcgataaacccttttcagcttttgttcaagctgttcaaaatgaacaaaacgggcttctcttagaaactcagtcccatcaatgaacaaaagaagcacaggaacggtgaaaactgaaaatctgccggcgacctctgctacatcgtcagcattgatatgcgccaatttgatgtttggaaactgatccaatactattctgagctggggcagaactgcgtgacatactgtacagccaggccttgatatataaataaaactgaatttgtgctgtttgataaaattttctatagaatctaatgaatgtaattctgtcatctctttcatcctttactccttcaaataggtctgtttttcatgaccaagctcatcaatacgtatcattcactatacagatttttatttatgatatccgcttttttgccttgcagagtacctgtaagcttgccggaaaatgtaaaaacaaaagaacagttactgacaagcagcaactgttcttacatactttcttattaaaaatgcaaagcgtaagctcctgaaccgatgagtgcaacccctacggaaactgcaatgagcaccaggttatattcaaaacctcccgcgccattcgcaaaacctttcgctccatggacttttacgatggcacctaacataatgatcgttatgatagcagctccaagcgggaggaatacgcctaaaataaatagaattccgcttactaactccccaagacctgatagagcggccgcaacgtttcctggtttcaccccaattgactcgaaccattgtccggttcctttaatcccgtatccgccaaaccagccgaataatttttgtgtgccataaaacaaaaacaccacaccaatcattatacgaataagcaacagtcctgcatcttccatttgtatctctcctcatctttgattttatctaattctttgctgacggtatccagcaatcatcaattgaatatatgtttctttattttttatgtgtcaaatcaatctaactctcttacttcaaacggcagcagcccttgttcaatttgtgtgcgatgcggttcatattgcacaggcagcatcagtttttcgcccattgtatcctgtgtttcatcatgtgcaaagcccgggggatcagttgcgatttcaaacaggatttccccatgttccctgaagtaaatggcattaaaatagtttctatcccgaacaggagttacaccatatccgtgggaagcaatatatctttgccaatctaactgatcttcatcatcgttagcccgccaagcgatgtgatgcaccgttccggcccccatttgcccgcggccaataggcgttaacttaaggtcaatcacatttccgatatcaccggcggaacgataacgaacgaagtccccttctttgccgactcgctccagccccatgatgttttctaaaaggtcagcggttttgtcaggctgcgctgataatagggttgcacccccaaaacctttaatggcaacatcgggcgttacttctccgaaagtccacgtattagcctctccttcttctctttccacgatttctaagtgcagtccatgaggatcatcaaattctacatattgttccccaaagcgctcgattttggtgtatggaacgttgaacttttctagtctcttttcccaaaatgccatagcccctttcggcacgacatacgaagtcacaccaacttgaccgtctccaatgacgccttggcgggctccggcccacggaaagaaggtaatgattgttcccggcttcccgccttcattcccaaaataaagatgatacgtacctgggtcatcaaaattgacagtttgcttgaccaaacgaagcccaagcactcctgcgtagaaatctgtgttctcttgagggtgaccgacaatcgctgtaatatgatgaattcccatcgtttttttagccatttttatccgctccttttatatatactcaacaaactcattcacaggcttccggtagccgcgtggtcttctgctctctgttttttcttttccaatcgtaatcatcatgacaacctcaaattggtcgtctatattcaaaatccgttttacggcttccgcatcaaagccgatcatcgggcaggtatcccagcctttttccttagcactcagcataaacatcatcgcagaaagtgaagcattccttatcgcctcatctctcttaaattgttctcccctgttttcataaaacgaaacggtgtcttgcaccatgtggtcatactcttgcttatttaatatccccaatacctttaaaccttcatagatatcggccgcttgttgatatgcctgcttatcccctaataccaagagaaccgcagaagagctaaccactttatattgtccgtttgcggcctgcttcagcttttcctttacgtcctggtcaagaaccgtcacatattttgtatgctgcaaattaaaagccgatggtgccaatgcaaccaattcaaacatctcattgagatcttcttttgtgattggatgacctgaaagaaaattgcttgcagatcgtctttcattgactaaatgagtaaattcagccattacgctacactcccttttatctcgaattcgagatattatgttataaaaaatcatattgaatattgtgtaaaagaactgacaacgattgaacacttagagttgcgcttgatcgctgatcttttcaatcaaatatctcgaattaaaatatcttgaatatgagataataataaaatacagatcttctcatgtcaataggtttttaacaatcaggtggaaatttttcactgacggcagcattttaatggcgaatcatcactgttgttacataagaactcatttgtttgctgtatgaccttttagcacagctccaactttttttctgtcaccttatttattagtaaacaggaaacaacgttgctgtagacccactcgaaattgaattggtatgataagcaaagtgattacacaggaaaggatacggagagcgtatatagagcactcctattttttttgtgcagttttataggaggaaaaaatggcaagtgaaagagaacaaataagcagaaaagttgctttgattgcattgatcgccaatctgatcttaatggcaggaaaggtcttttttgggctggcaggcgatagtgaagccgtgtttgcagacggaatacattccgcggcagatgtcgttgcttcgattgcagtcttggcagtgatcggcatttccaataaaccgcccgatcaagaccatccttttggtcacggaaaagctgaagtcattagtgaggcgattgtaggaattatcttagtgatcgtatccgtttatatcctcatagaagcgattctgtcctttgttaaagggccaagcgttccccaatacagcgcattgtttgcggctctgatttcatacgtggctaaggaaatcttatatcgttattctataaagcaaggggaaaaatggaacagcaaagcgattatagcgattgcgtacgatcataaaggcgatatcgttgcctctcttgccgcttttatcggcgtcctgttggctatcatcggaaacacccgcggatggccctatctgttgtacgccgatgccattgccagtgcaatcgttgcttacctcatttttaagatttcaatggaattaatcaggccgtctgttgatgtgctcatggaaaagagtgttgatcccgagctgatagaggaatataaagctgttatttttcaatgtgatcaagtaaaacgaattgatagaatccgcgcgcgagaacatggccactataaattgcttgatgtccgtttatctttggatcatgatttgacaattaagcagggacacgacatcgcccgcgaaattcgaaatgaaatcaaaagacagttttcagatgtagaagaagtgctcatccatgtaaatccttatttcgaagaatgaaaagctcctttttagaaggagttttttctttatgctgcaaactttacctttagaactcagcgtactatattaatgtgtgtatatcaatcatagggacagaaaggttgttagaatgaaggaatttttttcgattggagaagtgtcaaagttattcaatgtgaaaatctctgctcttcggtattatgatgaaatcggccttttgaaaccggaatataaagatgagcaaacgaactataggtattattctacccaacagtttgagcggcttgataccatcaagtatttgagggccctaggcctgccaatcaataagcttcttgatttttataactctcaaaatacaaacactcttcttcatttactaaaaagccagcaggctgaaattgatcgcaaaaagaaagaattggaacgcatcgaacgaaagatctcccgacgcatcacacatatagaagatgccgttaacatgccgttacatcaaatttcaaaaatcaaacttcccgcaatgcgtgtggcttacttgcagcatgaatatgttctcggccatgatatcgaacattcgttagctgaattgagaacccacctgaatgtaaacgaagatatattcataggcaagatcggtttatccatttctgcagcaaatgtgaaagcaaaacagtttgacaaatattccagtatatttatgattcttgaagatgaaaatgaaaaaacttcttcagaaatcatctttccttcaagagaatatctgcaaattaggtttaaagggtcacatccagaagccgaaccatactacaaaaaattactggcatatatgaaagaacatcattatgaagtagcaggggactcaatcgaaatcacactcattgattatggcattacgaataacctagataattacgtgactgaaatcctgctgcccatcaaataatctcatgaatatgtttttatctcccttgactctctactaactagagggtttattttttatgcaggaatgatttttggaggagaaagcttatgtttggcacgatttttaacacagtgatgatcattgcaggaagcataatcggggggatattcaaaaaaggcattaaagatgaataccaggatattttgatgcaggcaatgggattcgctgcggtcgcactggggatcaacgccattacacagcatttgcctgatagtaaataccccattctattcatcgtgagtttagccattggaggtttgctaggccagatcatcaatttagaattacgattcaacaagctggtgaacaaattttctaaaagcaatttagcagagggcttatcaactgcggtcttattattttgtataggctcgctgtcaatattaggccctgttgaagccgctttgcatggagattatacatacctcctgacaaacgggatgttagatgggatcacctccattgtgctcgcttcaacttttggttttggaatagcggctgctgccattgtattatttgcctggcaaggctccatctatttatttgctaaagtaatggagagcgcaatcaatacagaccttattaatgaaatcacaattgtgggaggcatactcatcctcagttcaggtctaagcattcttggaatcaagaagttcaaaacattgaatttgctgccttccctcttgatccctcctgttgtgatttttgtgattcattcatttggattgcggctttaatgaagcggctccacaaaggaggttaatattctgttatattgattttcaataatctgttccaatcgttttatttccttttcatcttggatttgacgtcgaataacaactgtattatattgtaaataaagtctgttatatcaaaatcagattccccatcacgaaacggcacattcatttaaacaaaattgggaggggcatttgtatgtcaaaccattcatctagtattcccgaattaagtgacaacggtatccgctattatcaaacttataatgaaagccttagtctttggccggtccgttgggaatcattctatatatctactcgttttggtcaaacacatgtgattgcaagcggcccagaggatgccccgccgcttatattactccacggagcattattcagctcgacgatgtggtatcccaacatcgccgattggagcagcaaatacagaacttatgcagttgatatcataggtgataaaaacaagagtattcctgagaatttaagcggtacaagaacggattacgccaattggcttcttgatgtgtttgacaatctggggatcgaaaagtcccacatgatcggactttcgcttggcggtctccatacgatgaatttccttttacgtatgcctgagagagtaaaaagcgcagctatactgagtccggcagaaacgtttttgccatttcatcacgatttctacaaatacgctcttggccttacagcgtcaaatggagttgaaacattcttaaattggatgatgaatgatcagaatgtgctgcacccgatttttgtgaagcagtttcaggcaggggtaatgtggcaggatggatcaagaaatccaaatcctaaagcagacggatttccgtatgtttttaccgatgaggaattacgttcagcaagagttcctatcctattattacttggtgaacatgaagtcatctatgatccccactcagccctgcaccgagcctcttcattcgttcctgatattgaggcggaagtcattaaaaatgccggacatgttttatcgatggaacaacccgcttacgtaaatgaacgtgtaatgcgttttttcaatgcagaaacaggcatttcacggtaagggcttataagatagtgttttgcattcataaagacctgcaatatacttctagccgggcatttcaaaaaatagagtctctctcatggactctatttttcttggacaaaacccgcagctggttttgtgtgcttgtttctttaggtttcttatatgatcagttgtaaaatcctttattttcaagaaggattctcaagatccttggcatcaagtagtgaatgcaaagtcaaaaaatcatgtcacttctcctgggatgcctgctagtatgatgcagcttctgccaatatgaaacaaagttccatccatatcgaaaatgagtgatggcgccataagtgtctccttttaactgccgacttcatcttctaaatactaccatatgcaaaaaaagcagatcattaaagatctgctttttctattacacactgatttgtttcttttgttcatgatctatttctggctgtatttcctttgtcagttgatgcccttctatatccacgttcggaatcatcttgtccagccaattcggcaaataccaggctgcattccccaacagcttcatgacacttggaatcagtgtcattcttacaataaaggcatcaaagagcacaccaaaggaaagtgctaatccgttggctttaatagaagcttcgcctgcaaagataaatcctgcaaaaacgaagatcatgatcaagccggctgctgtaacaacaggaccactgtgttttaatccagcctgaatggcttgtactggattctttgtttttacatattcttcacgcattctgctgacaagaaatacttgataatccatagctaaaccgaacagaattccaatcgataaaatcggcaggaaggcgagtatcggccctttttcaggtattttgaaaaaatcgatgagattcccgtcttgcaagacaaatacacaaatcccaagagtggctgtcatcgtcaacatgaaacctgcaacagcaacaagcggcacaagcagcgaacggaaaacgatggtcagcaatacaaacgcaaagccaacaataagtacagcaaacaccggtatcgcatcattcaggcgatctgaaatgtcaatattcactgcagtcgatccagtaacaagcaaatctactccgttttcatctgataaactgcgtacatcgtgtaccaaatctttcgttgtaacatcatttggacctgtttccggaacgaccgtaatgatggcaaagttcccttctttattaggcattgcaggggtgacacttgctacatggtctaaaccctttatttctttcactgcatctgcgaaagcctcagccttattttctgtagcatttgtggcatccgctacgattgttaattggccattaaatcctttttcaaagccttcggcaagcaagtcatatgcccggcgatccggattatccttagctttcatcccagcatcaggcaagcccagttccaaatgcatagatgggatactaatgacgatcaaaatcagaatgctgcatacacttagcatgataggatttttgatgacaaagcgtccccagacatttgtttcagtgctttgtttttctattttcttgtttgatttcggaatcatccgcttccctgcaatcgataagaccgcaggcacaagtgtgatggaagccaagacagccatcagtacactaagccctgctgtcagccccatcgcagacataaaaggaatgttaacgacagtcaatccgcaaagtgcaacgataacagtaagtccggcaaaaacgactgcgctccccgctgttcccacggctctcgcaattgattcattctttcgtatgccttcgcctaaaaactggcggtgtttcgtaaaaataaataaagcataatcaataccaacagcaaggccaatcattccggctaatgaaagactgacggaagcaatatcaaatacttgtgtcccaatcaaaaccagtccaatacttacacctaaaccaatcagtgcagttaaaatcggcaaacctgctattaataaagaaccgaatgtaatggctaaaacgacaaaagccaagataatgccgacaatttcagagacaccgcctatcttcatctcggctcccggtacatctccgcttagctcagtttgcaatccttcatcatcagccagtttcaaactgtcttttaagtgtttgatagagtaattctttatatcatctgctgatgatttatacttgatatcagcataggcaactgtgccatctttcgcgattgtccctgtcacaaaaggacttgcaatcgagtcaacagaatcatctttactgatttctttgaacgtatcttctattgctttttttgctggcttcccagtaagtttctccccatcaccagcaccgaaaataacccgtatgctccctttatcaggaccgtgaggaaattctttttgaatcacatccatcgctttttccgaaggtgtgtcaggtatggacatatcctcagaaaaacttggtttcaaggtgactgcaaggcctatcgcagcaactaacacaacgatccacgcacatattgcttttatgcgattgcgagcaacccatcctcctaatgtatataacatttttgacatgataatctcctttcaacacattgcttgatcacattctttctcattgtagttgacaatgaaataaaaaaaacgtacattcgggcatgtacgtttgggcaattttcaaatatgcagtttagttgtctattgtcagaatacctttttgcatggcaatcgttactgcctcagttcttgaattcgcgcctaatttattgtaaatggacgttaatctggactttactgttcgctcagagacgtccaaatcaaaggcaatcgctttgcttttaagacctttagcaattgcttttagaacaatgacttccttttccgtcagctgcgtctcactgcgctgctttttcatccgctcaaattggatttcttgcagacgtttgaggatatcaggctgcaacagcacatttcctctgatcgctgcatccattgtgtgaaaaagggtttctgaactcgtatcctttaacagatatcctttcgctcctaattcaatcccttcgatcattaagtgatcttcattatatgtagtcaaaataatgatgggggtatcgtgtttttcttttatttgtttaatggcctctaacccgctcatctccggcatatacaaatccatcagaatgatatccggttctaattcatctgcaagacggactgcgacttttccattttccgcctctcctataatggtgtattgatcattcgtttcaattaaaagcttcagaccttccctcacgacaagatggtcatcaacgattaaaaccttattcatcttgcatctctccctgaattggtacagtgatctcaatttgtgttcctttcaattttgcactcttgatattgaattggccatttattgccctgacgcgttcttgtatgccaagaagcccataatgtcctctctttttctttcctttttcaacattaaatcccttgccgttatccttaactgttaaatggagccttcccttttcatcatcccaaatggatatccagattgttttcgcctcagcatgctttgccgcattcgtcatgcattctccaatgatgtaataacagttttcagctgtacgcacatccagcacctgatgcaatctgtaatctaataaacaagccatgcctgtcgactctataaaatgatccattagcgaggtaattctttcttttaaaacaccgatttcttctgattttctgcggagatcgtcaatagctgaacgtgcatcagctaatgtgcttttcactcttttcatcgattgttgtatgatttccttcgctctctctgtgttgcctttggcgagatgaacatgaatcgcatccagctgcatatttaaactgacaagaccttgagcaagcgtatcgtgtaaatctcgggccatccgctgtctttcgttctgcagcgtcagctgttctacctgctgatgagccagctccagcctttcaagagtcaattgagcttttattttttcatcgacttgggcaaaaaatgttgcggcataagtgatgatgacaatcatgattggcccagcaataacaataaaatgcaaaacttcacctttatgaaggtgatacgccgaatttatgaccagcagcagcaatagataaagaatgagaaaagtccttcttctgtctgccattcctaaaatctgtccaattaaaaatgcataaaggccgataatgacaagtataaagaagccagtcatgagattagcaagtgcaaaggtgatcaaaccttgtaccacgaaatacagaatcactcttttcttaacccagcgatatgagtgccaatgaagcaaagcaaaaatggcaattaatatggtaaacgcataaagcaataaaatggaccagcccccagaaacaaattgcagcacgatagaggctatatagatcataagaataaaagccaggcccggcactctgagtgcaagcatgtttaatgcccgcctatcatgtgagtaatatttatctttaaaaggattccttataagcaaaccttatccacttcctttacctgtttcaccgaatagagactcatgaaaatcgaacccatatttcaacttgcaaacatacatgtatccaatcattttataggaagagaaggaacacaacaatatcaggtgcagggaaacattagagtttccaacaagtgatcattgcccaaacgtacatgaacgttctgcctctatgtacgttttatcttttcaaatttacctttaaaatcataaggaacttactattcattgaaggaatgatcatcattgaaatcgattgatctcacaattttatcattaaagagaaaaggaatccggaccgaaaaggtattaaaaaatcagaaccctgatcgattaagccatatgacagacaaaaatgcgcaaccaaaaagcaaggaaaaagaggattgaacatgtattggtttctaggtgctttattatattttctgatcggtacttatatattcattagagtcactagagacagccaatcaggctcatggatactgcttgcattagcagctccactcatcattgctggctacccttatttttattcaaagaagcttctttccaaaagacgctgaaacagctgtcattcaaaccgcacattggtaaaatgatcaataccgggatacaatctaggtattctatggaaaggagtcttgccttatgagtcaaagagtgtcctactatgagattgcacctgaaggtatgaaaatcatgatggatatggagaaatacacgaaacaatcctcaattaaccgaacgacgagagaactaatcaaaatcagagtctctcaaatgaacggctgtgcctactgcatagatatgcatacgtccgatgcccgcaaaatgggggaaactgaacagcgaatttactgtttacatgcttggaatgaatgtgatttttactcacctgaagagaaagcggctctcgaactatctgaacacatcacgctcattccatctaaaagggttcctgatgagctatatcatcgggtgcgggaacattatgatgaaaaacaatatgttgaccttgttctcatcattaatcaaataaacagttggaaccgcatctctattgcaatggggaatcgagctgcttcaaaataagaagaaggagtaagattagaacaaatcttaatcctccctagatttcgtaccgcatcatctgatgtttccgtttcaacatcctaaatcttcacgtttaggtgcttttcaaacgcgattttcccgctttgtgtaatcctaatcgctctcgttttaggcatacgaacgatccactcttcttctaacatgcacaccaatagggcgtttcctaatgctcctgcaatatgatgctgccgttcactccaatccaaacagcagcgggcaaaggctctcctcttattccgttgttgctcttcattgatgcctaactttgaaaagaataaagcaccctctgaagtcacctcaaagtttaaatcaactttttttaacatcccctgctcaactaatgaatgtgccatttgcacgcccacataacctgccaaatgatcataacaggtacgggcgaaatgcaagtcctttttctcttttgactcttttaaagatttgacttttgctttaggcgcaatatgaagcaattgttcgatcacatttgcagcatctgagtcagacaatctgtaataccgatgtctcccatgcttctctacgctaatcagctttgcttcaagcaatttattcaggtgaaaactggcggtttgaggtttaatgttagcgagatatgcaagctctcccgcagggtgtatcctgccatccatcagactgagaagaatggaagaacgcgagggatctgatagcaacgaagagatttttgcaatattaggattcatgattttcctccttacattcatatttcgatgatagttgaaatgttaatcctttacaatataaatgtaagcgtgacaaggaggaaaaaacgttggacatcaaaaaacaagacactcgtcaatttaaggaaatcaaacccaagatcatgtattatggtacctcgacatttcttctaaccacattgaatgaggatggaaccactaatattagtcctatgtcttcttcttgggctcttggacattatataatccttggagtaggactgggaggaaaagccatcgacaatttggaaagacacaaagagtgtgtcataaacttgcctggcccggaattatgggaaaacattgaaagaatttcatcttatagcggaaaaaagagtataccgcctttaaagaagcagctcggatttacatataaaaaagaaaaatacgaggcagcagggttaacgcctttacaatcaaaaacagtatcaccaacacgaattaaagaatgccctatccaaatcgaagccgaagtgaaacacattcggcttccagaatatgaatcgtcattcgcaattgtagagacgcaggcactgcattttcatgccgaggaaagtatcattctggacgaaaaccatatcaacccttccaaatggagcccgcttatctataatttcagacattattttggtttaggaagagaagtcggaaagacttttcgttcagagacatgatctttttaagaccaagctaagacttggtctatttttataatagataaaagcacacgtcattgtcatgctgtcatcatgatataattgaaaaaattgtaatgacaggagcgtgcggcctcgatggaattatcttttctacctaaaaacacattcatagaccctaatggacataatacaaatgaagtaaaaagcttagtcgatcaattagccggattagttattgaacattcgagtcatgctgcaaagagagacacactgcctgctgtggagtcttttgattatagtgatatacccgaaactggtatagaaattgaaaatatcttggtaaacctgcagggtatcatcaaaaactcaatgaatcctcaaaacccaagatatatgggccatatggattcaatccccactctcatttcatgcttgggtgacttcataagcagttcccttaataacaatatgctaagccttgagatgtcccctgttttttcaaaagtggaagcacagttactcaaaaccattgcccgtatgtttggatatgatgataagtcaggaggagtgatgacaagcggcggaagtctcgctaatctgcatgcacttacagtagcaagaaatcatcaattaaatatgaaaaagacaggtatcttcggactttctggacagcctgtcatctttgtttcggacgtcagccatacctccctgcacaaagcagctatgatcctaggtttaggtacctccagtatcattccggtaaaaagcaacaatctggcccgcatggatattcatgatttagaaataaaaattcatcgtgcaaagagtgaaggccacattccatttgctgttgtcgcaactgccggaacaactgtgacaggaagcatagatccaattttgccaattgccagaatcacaaaggaaaacggactgtggctgcatgtagatgcagcatatggcggcgctttaattttttctgaaaaatatcgtgataaactgagtggtatcgaaatggctgattccattacttttaatccgcaaaagtggatgtacatcacaaagacctgtgcaatgactctttttaaaaatcgtgaaatacttgaaactgatttccgtatatctgccccttatatgaatgaaactgattttattaatctgggtgaattaggtgttcaaggcacgcggcatgctgatattttaaaattatatttatcacttcaacacgttggaacaaaaggatacaaccagttgataaataaaagtttcgcactaaacgaagaatgtatagaacaagtgaaacagcggccttttcttgagctttattgtgagccagatacaaacatctgctgtttccgaggtataccgcatgacattgaaaaggatcaatgggataactggaacctggaactgcagcagttcttattgaaagaagaaaatatcttcttgtcattgccggaatggaaaggaaaccgctggctgcgtgctgtgttcctcaatccatttataacaggttcgcttataaaacaaatgttcagaaaaatagatcaattttatgatcaatataaacaaattgtttaataaaactcaccagatcaagccaacattagcttgatctttttttaggaaatatccttgtgaataaatactacctgcttgccaattctttaatcattaaacccaactcataaatccccttttgaaggtcttcaagagatgcataagcatatgataaacgaatataattccctttttcctgagcatagatactgccgagattgagcagaatcccttttgataaggctttagtataaagtaatttcattgttatggaaggcaatatttttatccagacaaaaaaccctccttttgggatattccatgtcgccacatctttcaaatgagtttctatagcactcaaggccaattctcttctcacctttaattgctgcctaaccttttctacatgctgctggtattggccggaagtaaaccactctgccgctactctttgggataaagaactggatccgtaatctgtttgcattttaatgtcagataaacgttcaatcaccggttccggtccgacgatccatccaatcctcaaacctgggcttaatgttttcgataaacttcctatgtacagtacgtgtccatttttatcaattgttttaataggatatggcggaatttcatcgatccataactcacgataaatgtcatcttcaataataggaagctgtgtattctcacttactgctaggatctcttcacgccgctttttagacataagaataccagtcggattgtgaaaacatggatttgtatataagatagcccttccccgctctcctcttgttaaatgaacattttcaggcaaaagtccttcattatccataggaagtccagtcagcttcataccagctgattgaaatacgtgtaatgaataaaggtaagagggctgatcaagataaacggttgatcctctttgtaacagccccattgatatcagctgcaaggcttgcaacgctcctgagacaatcagaatggaagaagatgagacgttgattccaatggtttttaaatagttgcttaatgcctccctcaaaggtaagtaaccttttggttcttcataaccgaatgcctccatgtgatgagataccttccccatcatctctttcataacagccaaaggaaaaatctcaggtgaaagttcacctttactgagctgtataaggtctgtatttgattctgattgattgatctcttgaacgattttccggcttggcatctgaatgccagaggtgacatattgatcccaatcgggagcagaattcttagccatcagtgtccatgtgttgttgataacaactgtgcctttccccattctgccttctattagcccatcggccatcaattcctctaaggctgtaatcactgtgctccgatttacctgaaaatcttttgcaagcgtgcgctggcttggaatcttgcttccaatcggccactcgccatttcctattttctctttaataaaatgaacgatttgtctgtacttagggagctttttcatctttttttcttctggaaagctcatagaatcggtctccttaaaataaattggttgggtcaaaatccgtttaactggttgaagccatatcaccaaatctttattaatataaaaacacattaaataactggttggtttttgtaaagaggagtgagaggaatgcgaaagaaaacagttcaaataattatatctcatagtctcatgattggtttatgggcatctgcttttccgggaattcgcgcaggactagaagggtacacaccagaacaccttgctttatttcgtttgttaatcggctctatggcattattgctttttgctgttttgactcagatgcgcctacccgacttgaaagacattcctgccatttttcttttagggtttttaggatttgcactctatcacattttgctgaacatcggtgaaaaaacagttaatgccggagttgcaagcttactcgttactacggcaccgatcttctcagccatgctatcccgcctgttttataaagagcattttggatttacgaaatggcttggctctgtcatcagtttactgggtgtgtcattgattgcatttgggacaggagacaatacatactcattgaaaggctttttggttatcctgctggcagctttttctgaaagtatttacttcgtttttcaacctagctatataaaaaaatatggttttattccatttgttacatttacaatttggggcggaacagtacctatgcttatttttttgcctggcttaggctcggaggtgatagacgcacctttgaacgctacattgtcgattgtttatttaggtttattgccaacagttgtgccatactttgcccttgcatatgtcactttactcgtcggtgcctcagaagcaaccctttcactttatgttacaccggctttagccttgatcatatcttggatctggatcggcgaaatgcccacattgatctctctgctaggcggagtggttacagttggcggagtatgttttacctacctaaaagtaaataaaatgaataagtttttcatcacccatttttctgttaaaaggattaaaaaactctaaaacaaaaaagataccaacatcgtttggtatctcctttaaaggttctttcttaagattatctagaaaagtaaatagagtattcagttaccggcttaaaacccaatttagctgctaatgcaatggacgaattgttgcagatatcacaatcccagctaggaacaatcccattttccatacaaaacgctataaacctatttgctacgcaataagctaaccccagtcctctatattcctcaagtgtgtagatatccatttccgctcgattatgccctaaaaatatagaggtacactcacttactacgtgattgccatgtaatacggcaaatccaaaaccttttgaagcaaactgtgagacagaatcccaatactcctcataatacgcgctgttaaacgctgtgctatgtgaaatgatgtcttcgtcaattcttttcaatacaagcccctttggcagttgcaaagtctttttgaaagattttggttgataagaaaatgcagctcttctcatttggtttaagtcatctttcagtatgggtttcagtacgctatcccatgtatcactggaagaaaacaaggtaaatcgttttgatgatttcacttgttcttcataatatcctgcaatgaaatcatgaaaatcccgattcccttggtctcccgcaataaaataaatgcctgattcagttcctataaaaaacgatttaggaaaggtttgatcatctgcataaacagctcccggaatggtttggtctaatattgaatagacaaatgtgggacaatatttgtcatcaaacattgtttttaagctactgtatttttcttttgttaattcctgcaaaacagacaactcctttaaaacaccgtctccttcatgattctgttcacaaatcaattttcctctgtcaccagctaaataacttccctgttacgaatctcagacaaataaaaacaaaaacaggtgtctgcactcagctcgcagacacctgttgaacaacacattgcattatataacccaaggaaacgctgaatatatcgattctttattccccagttacagcaaactgttttaaacggtcaccaatttcatcacggaccctttggaaacacttcttctgttccgtgtgcttttgccggatcatcaaatttatccgatgtttgatttgaaatatcaatccctgcttctttcatagctttgacagctttcagatgtcatccatgacattcgatttcagcgctatactcattccacttgtccccaagatattttctcccccacccttcagccatttggctgcggcaagagttaccagtgcattgttttccttgatatagtgaccttgtccttttagaaacaagaatggattatcagcagccaaatatacaggccgacaagtgtgatcaataaagtgggtatcgtgaggataattcctgttttaaaatacgtgccccaggaaatcttcatacctttgtgcgaaagaacatgaagccataataatgtcgccaaggaaccaatcggtgttattttaggccctaaatctgaaccgatcacatttgcataaataagcgcttctctcatcatcccatgtgtatctgtaccggcaatcgccaatgcgtcaatcataacagtcggcaagttattcataatggaagaaagaatcgccgcaataaagcccattccaattgtcccagcaaacaatccttgatcagctgcggcttgaatcacatctgaaaggacatccgttaatccggcatttcggacaccatacacaacaacgtacatgccaattgaaaagaaaacgatagcccatggcgcctctttcaccactttctttgtatggacggccggactcttttgcgcagcgattaagaaaatgatcgcaatgctgcccgctaccactgatacagggatagaaaaaaattcacttgcaaaatatccaattaacagcagccctaagatataccatgacagtctgaacatgttttgatctttaattgcttcaacaggttttttaacctcagtcagatcatagcgttttggtatgctttttctaaagaaaaggtaaagtacaatgatgctcgccagcagcgaaaacaagtacgggacaaccattctggatgcataatcaataaacgtaatatgaaaatagtccgctgaaacaatgttgaccaaattgctcactactaaaggaagcgaagtggtatccgcaataaatccgctggcaatgataaaaggaaaaactaatttttcattaaaatgtaatgctctgaccatcgctaatacgattggtgtcaatataagagctgcaccgtcatttgcaaataacgcggcgacaatagctcctaatagagatacataaacgaacatccgcacaccgtttccttttgcagccttagccatatgaagcgctgcccattcaaagaaaccgatattatcaagaattaacgatatcagtatgatggccacaaaagccaaggtcgcattccaaacaatccctgtcacagttaacacatcatgaaaattgacaacacctgctattagagctaaaactgcgcctccacaggctgaccaccctatagataaatttttcggctgccatatgaccaatactagagttaataaaaagatgaatactgccaaaatcattgatgtcaatctaatgcctccttactggcaacacgcttgagttttcttttgtttgatatggtttaacaattcatcctcctgatcgatttgatgtaagatcaattgcaatgtatcaaactcaggacaggaaccatttattgaataataacgccattggcctcttctgtcctcattcacaaaacctgcgtttcttaatttccgcaaatgctggcttatggcgggctggctcatttcgaacatatcaaccaattgacagacacaatattctttttcaagaaataatctcatcattataagcctagtttgatcactaagtgttttcaaacaacgagtcatcgccgcaacatcaatcgtcatatgagctcctccttcccaaatcaatatataagcaaatcattatatacacgccaaatgattctacattcccctttacgtttccatatgtagcgctccgtatatcttaaggatcaaaacttcgaaacgaaaacctgagtagctccccgcgttaccttagcgccaccgtcattatataaacttttatttatataaacaatcccttatatttggaacatcaaatatgtttgattcaattaatatcaatctctttattttcctttacccattgtacattgaaccgagtacggcaatatagcttgtgtttgcttttggtttttggcaggaaggatggccaggacaacacttatggcggacaaagcatttcattcccaaatcagtaactgaaatggatatcggacaggaaagcataatacataagcaatcagcaaaatacaaaaaataccaggggttttgatacccttggtatttatgattgagaccttcaccggttattcacccacaagcctcaaaaaagtgtttttgattaaattacccgcggcatgtcagttacggttaaaaaggtcattctattttttaatgatgattaagacttctaaaattgctgcccttcacttcagctacgtcatatacggtgacaaaggcggatttatcaatatcattaataatttcctttagtttggtttcttctaaacggttgatgacacatgtgatttctttaaatttctcgtgggaaaaacccccgtaagcttctttatatgtggcgcttcggcctaattgatcacgtattgtctctaccattaattcaggttgggttgtaataatttgaaaggttttagagccgcttaagccttcctccacaacatgaatcactttggatgcaatgtagtaagcaatgactgaaagcaatgccccttgtaagccaaatactgtggaaacaaaaataaacacaaataggtttaagaatagaatgagatcgctcgttccgaatggcagttttcgggatagcagcacagcaagcatgtcaattccatctaatgcgccgccattacgcagcgccagccccattccgaatccaaggataatcccgccgacaacggtaattaacagggtatctccttctatgatagcgggtgtgtggtgaaaaaagcttgtccccgcggcaagcgatacgattccgataattgataataatgcaaagcttttcccaatttgcttatatcctaaccagacaaatggaatgttgatcacagcaatcaaaatccccagcggcaagttgaatagctgtgaaccaacgatgctaagacccgtcacccctccatcagatacactgtttggaatgagcactgtttctagtccatatgccgcaatgattcctccaatgataaccatgatgatttggagaatcattttcgctttaaatttcttatgttttttggttgtattcataccattcctcatttctcaaatatttcgttatatttaaatataccataatagatattttcagctaaaaacatgcattttttaaaataaagtaattaacagtaaggtaaccctctttgacttagaacattcatgtaccgtgccgcctgttgagcaagcgttccttccagttcagatcgcgaatcgccctcaaacttcaacaccgaaaatcctgaattattctgatatgataccttaaaaaggaggttcgattacatggatagcctgtgccgaagtaaacaagccccatttgaatacaccttgtctcttatagggggcaaatggaaaatgagaatactctatgagttagggtgtgaaaaaacgatgagatacggcgagctgaaaagggctatgcccttcatcacccataaaatgttaagcgcacagcttaaggaattgcaaaatgacggccttattcatcggtatgaggtttctcaaaccccactgaaagtagagtattcgttatctgacagagggcgatctttgtatcccctcatagatgaaatgtgtaagtggggaatggcacaaggaatgcctcatatgtaaaactacttacaaaaaagtgcgtacttgtttcccaatgagaggaattttatactgaatgaaaatatttcttaggaggaaataatgacaaaacaagtctatatcattcatggctacagagcctcctcaacaaatcattggttcccttggctgaaaaaacgcctgctcgcagatggggtcaaagcagacattttaaacatgcctaatccgctccagccaagacttgaggattggctggatacactctctttatatcagcacactttacatgaaaatacgtatttggttgcgcacagcttaggttgccccaccattttgagatttttggaacatcttcaattacgaaaacagcttggcggaatcatccttgtttccggctttgccaaatcgttgcccactttaaagatgttagatgaatttacacagggatcgtttgatcatcaaacaatcattgagtccgcgaagcaccgtgctgtcattgcttctaaggacgaccaaattgtgcctttttcattcagcaaggatctggcacaacaaattgacgctgcgttatatgaagttcagcacggaggtcattttctagaagatgatggatttacttctttgcctattgtttatgatgttttaacctcttatttttcaaaggaaacccgctaacatctttcacctatctgctttaatcgagcccgcgaaaagcgggctttctgagttatcgtttcatcaatacggataactcaccttcaaacacttttacttctttttgattataagtagataacaatactgtgagtattcccaattcatttctctttggctgcttatcaagaacctcaacaattgtaaacaattcatcatccggatatacgggttttatgaatgtcatatgattcatctctgttccggctataatatcgtctccatagagaccttcttcaatccaaagtttaaaagatatggccagtgtttgtatgccggaagcgataattccattaaatctgcctttactcgctttttcttcatctacatgcatatactgagggtcaaattcacccgcaaaccgcataatatcatcttttgttacttttaatgatttcgttttgaagacctggccaattgtaaactcatctaacttcattcttacacctctattttttcaattgtctattttgtttattttagcactgtgatgagcaaataaaaaattctgtttttcgctaaacagacatatcgtgggctggactgctggcactcatcatatacttaaataatattgaacagctctcaacacttagtcgtcacttggccgtcatgctaaactgaaagcttcctcatatcttccaggcagccttcagtttttttatgccttctcttatgtcggattcagaaacccctgcaaacccgagtgagaccgtttttgcaggaggatgattttgataagaaagagaaacaggataaatttttactccatgttttttcgccttctcaattaactctttttcaccaaatggcaaataaacgtcaagtaagatacgaagcccagagttttctccgcgaattctgacatgctctcctaattccctttgcactgcctctaatacaatggctctttttttgcggtaaagctttctcattctgttgatgtgtttttgccactctccattttttataaattcagctagggttagctgactgtggcaggacactgtctgcttatataatgacgtgatgtcatgccccttttttaaaagaggtgaaggaagaatcatatagctgatacgcagcgagggcaaaagagacttagaaaaagtgcccatataaatgacacggttatgctgatcaagcccttgcagagaaggaaccggctgtcctgtgtacctaaattccccgtcataatcatcctctatgataaaggattgattttcggctgcccatttgagcagctgaattcttctgtttattgtcattatggttcccagcgtaaattgatgggaaggtgtgacatatacaaggtttggctgctgttctttgaccttctgtatacagattccttcctcatcgactggtatcggaacaatattcatgcgattggcttcaaaaattttgcgtgctcttggataaccaggatcctcataccctatagaaatattcggctcaaaaacttggcacaagatttgcagcagaatagggttcccggcacctataatcacttgttcagggccgcaatgaacaccccgagattgatacaggtactctgcaatgagtgttctcagctcaaactctcctaaaacatgtcctggccgataaagctcgtgtccatattggtctaagctattgaccatgctttttcgccatgcggaaaaagggaagtaagaagaatctacattcccataatgaaaatcaatccattgtttattttcttctgcttcttgttgaatgggtgttgtgcttggcattctatcattagcaaaatcagaatcatgataatcagcaaaccacccgcttcttggcttgctcacaatatagccctcagcagcgagctgttcataggcacgttctacagtcgtttggctgatggaaagctgattcgccaagagtctttttgaaggaagcttcattcctttttgaatacggccccgatgcatgttttctttaaaataccgataaagctgctgataaagcggactatccagatttctattcaaaaaaggcgtgatatccatttgcacgttgttctcctaactggtatgcaattttttatgaaaactggctgtttataaaaggccaattccagtttatagtcattgtaatccttagctactggttttgttaagaaaatacagacaatgaacaagaaagatatgtggagtgattataatgaacaaaacaacaaatggctggataaatggttttataggcgtactcattttcagcggctcgctgcctgcgacccgtttggctgtgtcggacttcgatccgctgttcctcaccgtatgccgcgctgcgatagctggtgtactggcgggaggtctccttctcatcttccggcagcagcatcctgccaaaagagacctcatttcattattagtggtagcgtttggcgtagtgattggtttcccgttgctgacagctttagcgcttcagcatgtcacatccgcacacgccattgtcttcattggacttcttccactcgcaacggcggtcttcggcgtactgcgcgggggtgaacgccctcggcccgtcttctggattttctcaaccgttggcagcttgttagtagcaggtttcgccctcattcaggggggaggttcatccccgcttggcgacgcgtacatgctggcttctattgtcgtatgcggtcttggttatgcggaaggggcaaggctttcacggcgtctggggaattggcaggtgatctcatgggcactcgttctgtcgcttcctcttatgctgccattgtcgttcttttttacgccggactcatggtcggcgatcggcgttcccgcactgctcagtcttgcatatgtatccttattcagcatgctgatcggctttgtgttctggtatcgaggtcttgcccaaggcggaattgcggcggttgggcagctccagcttctccagcctttttttggactgctgcttgcctcagtgattctacacgagaaagtgggctgggcactcgtagcagtgaatatcgccgttatcatgtgcgttgcggctgcacggcgatttgcaaagtaaggcagacctttaagcataaacttcaaaaatgcatgaaagtataaaaataccaagggccagcaacccttggtattttgtatgcgatcgaggagacttgaatctctcgcttagacaaataagtcaacacccatttcctgcctccattataaaatccgctctaataactcccccactttttctgccatgacacgaggcggataaggcatttcgttttttaaccaccattccactacccctacgtaagcatttgctataaattcaacaatgacatcttcactttggccgtaattcttgcctttcgttacatctacatctttcctgaactcttcgatattaaacttaaggaactgactgcgaaaatatcgagcgccttcactggctaacatcgtcgaaaagaataaataattactctcaaggtattccatgcagtgtacagtcgattcaatccagtccatttcagctgccgactcacaaaaatcccccatattgtttatatgctcttccataattttttctaatagatcaaatttatctaagtaatgaagatagattgttccccggtttacatttgccctttcagaaatttccttaatcgtaatatgatcaaaacttttttcagtcatcagctcaatcagagctattttaatagcctcttggcttttggttattcttctatccactttggacatagcttttcaccaaactttcttaagataatcaacaatttagagtggaatgttgaataatcaacaaatcgcctgaatgtaaccattgtacacaccatgtttgtatttacaataataaataaaagctgatagtgaatcatgctttttcccgaatgaagtcattgtccattttagttagttgagaattattttgtaaacacaaagaaagggtgttatttcaaaatgcagagaaaatgatgaaattagatcacttatcctaaaggtactctaaattcaaatttgatctgcagcccaactataaatccgtatagaggcagactttaatgaggtgaagaatgattaaaagacaatttacgatcattaaggaaacagggtttgcgcgaccagctaccctgttagtcagtatagctcatcggtttacatcagatatttttcttgaataccaagggaaaactgttaacctcaaacaagcgccaaaagccatcatggacattatggatttaggaattaaaccaggaaccgaaatacatatatacgctcatggagccgacgaagcgaaggcaattcaaaaaatgaaagagcatttactaaaaaacgattatatacagtaatttcaaaatctatcgtagtagcgggattgttatcgttaatttattttgcggcaaaacagcttttcagatcatgcgttcatttttcttctggtgatcattcaacctaaaatacaaaaattaaaaaggatctacaaacgaaaatggagggtttatatatgtgcagcagaacataataccaagggcagttatacccttggtattattggataccgaaagaacttaaatctctacaggtgcttataagctataaatggttagtctcgtggcatttctatgtgctccgtttatgcttaagggtgttccacattttaatggatacaatagaaaccaaaacaaatgatgcgacaaccaatacagttcccattaatgactcactaaaattgatcacaatgaaactcgaaaatatcaataaagggatattcgtaacgataaccgttaaaatgtaagtggtatacttgattcctacagctgccgataaaaaacaaacgacatctgttggagctattggacaaatcatccccagcgccaaaaacttataattataagtctccaataattttttcaactctggatatttacgttctaaatccttcatcatgttcccgcttgaaaacacagaaaaaggggcaaaacttcttaagaattcttaagttttcgcgatgctattcaagatcgtttcctcttcttaaacagttttcaatatcatcctatctattccatggtaatatttagatacataaacttatatatgaagctgacctgagttaatggagaggaatgaaaaaatgaagaaacacagaaagatatatttttgtattactgccctgctgctcatgattttgcttgctggatgtacgggcagtaagaatggagaagcacatcaaccttcaaatcaagcttctgctgtgcaaactgacgaaaaacacactgagcctgaagagagaaccaaaatacgcaaggatgaagcggagccaataacagaatcagaagaatccgcaacaaaagctgcaaatgatacctcttcagcagaggagaaaagcaaagaagacaatgtattggcagcatactcttcggaaaaaattgaatatgccagggtttggcttcaactgggacctaatcaagagatagatgaattaaacgttcgacatatttcggctggcgagccaattaatcctaatgatgatacaagtgccagctatccagaagatgtgacccagttggcaggttctcgtttagtggatggatcagtcacttatcatggcaatggggatggcacgattcatgtatataatgtgcctttacgctgggattccgctgatgatatagaaaaaggcgtcatgagggaagtgactgagagtatcataaaaaacagaaaaacagtgtacgttgatacaggcgacgatgaaaaaatcaaacggctcattgatatcatgatgattcattaatcagtattcgtttgtctgcacctgactaaaaacaatggttaataaggtatattaatacaaaaacaaagtttggagtgtagtaacttgctaaaaatcttccggttctattagttctcctaggcattctaaatgtgatgagccgtaccattgagctatttctaggtgttgcattaatattttataacgctgtctagtggcatacaatgttaatcaaaagaagcatttcagcagtaagtgaatgttgtcctaagaaaaaacaagcatcttactatgcttgtttttcttctatagaaaggatcttattacgctatgatgatattcctttagcctgaaccttggcgtgcctaatcctttaatccctttccatcgagaattttttgcacatatttttcgactctcgattctcgggttttggattgtttggcttgagaaaaataaagagtgtacgctctttgccgtcccggggtcaaagcttcaaaagcaattttcaatgcagggatttcatcgaatttattttgaagttcttcaggaatgttcaattcaatatttttgttaacttccactttcaaaccggctttttcaacttcaatggcttcgtgaatataggctttcaaaatgttttctagctcatttatttcctgaacagttgtaaaccgaatctggcgcgccgcctgtacattctccgtttgttgaatgagaattccatcggtatcctgtaatagggcacctttgtgaaacagaagcgcacaatattctttaaacccatgtattaaaacgacatttttattattgtatgtgtaacaaggatgcatccacttaaaatcttcagtcagctcacagtcaagaatgatggttctcaacttctcaaattcttccttccactttttcgctttacttaaaaattcatcaaccttcggattcgttctgctatttgtcatgaaggaattcccctctttccaatctttttacatttacgtgaattgacaataatgaagtccagttttatttttgacatctcggtatttattttattcttctataggttccttctcttattattcaatagattaagcttaaagtggggatgatgcaacaaaaaaaaagaaggcccacaagccttctctttttgtataattatttcactgacaatctgaaaaaataacaattcgatgattatatatcttttttattcttgccaatgcataaggttacggcaacactagctatactgactaaagttcctgcaatagaaactagaattgtcaaaaagccattgggaataagaaatccaattggaatgagccccagaaaagtgaaaacgataaaacattggtatacaccagatattattcttacaaccaaattgccaaaaaaggacatgactaatggagggataaataaaaatacaacgattccaattgagatcatcaagataagaggttcatcaaatgagatgacatgatctccaggcgactctttagcggccgctaaaacaacaagtatagacatcattagtgtaacaaaaacaagagaaaacctttttaacaacgtgatgactcctttacctaaagcgagtaatcctgcctttttcaaatccgataaccattttatgtgattcaattaaagaatatgcagtgagtgacacagctataaggaatcctagtcaaatctttataatagatttaattgagcaactatagttagttagaatattagacgacgcaatagactttatctaacaatataacaaattaatgtaaattaaacaatcctatcctttagcggcccctaaaccataccaccactggaatgagtaataaggacaacatccctccagtaaatgataatgcgaggtaacttgaccctgccacaatcattccagataatgctccgccagcagctcctgacaacgcaatcagaacatccactgtcccctgcgttttagctcgtgtggcactatcagttgaatctacaataagggcagtcccgcttatcaaaccaaaattccaccctaatccgagtaaagaaagagcaatgacgagaagaaccatagaatctcccggagcaaatgctgctattacacctgccaaaagcaacgttgttccagaggaaatagccattgcggtacgtcccaacctatctacaagaacacctgtaaccagtgaagggagatacatagcacctatatgaaaaccaataacaagccctactgcccccaagtcatgcccatgatgtctcatatgaaccggtgtcattgtcataatagctaccattactatttgggtaagaaccataaccgttgccccaacgattatcccttttttgttttctgtatgctcagttgccgccaaatgtcctttatcaccaggctcttcatttgccgcttctattgttcttgctataactaatggatctggacgaagcataatgaaaaggaccacacctgctaacatatatgctgctgcggctaaaatgaaagggccagcaagtgatggaacaccaatagaaagagcgaaatcccccatcacattcactaagcttggacctgccactgcgccaaatgtagtaaaaaccatggttatactaacagcagtcgctcgctgcttatgatttgctaagtctgtacctgcataacgggcctgtaaattagtggctgtacctgcaccgtaaataagcaacgaaataaataacaagaaaatactatttatgattgctgccataataacgcctattgctccaagtccgccaatcataaagccagccgaaagacctgttcgacggccataacgttgagaaagtcttccaacaattaatgcagatcctgctgaccctaaagtaaataaagcagaaggaagaccagcaaacgcatcagtgccaagcatttgctgtgcaataagcgcaccgacagtcactcctgccgccagccccgcaccgccaaaaatttgtgagatactcacaacgaatagtgtacgcttgtataacgatttttgtttttctggtgaactgatgtagctttgtaatgaagcagtttgaacatctattgcttttacgctgtccttgtctaacatcatctgaccttcctttctaaaagccaattttgtataaacctccctctagatgtggatcatcataacacgcacaaaaaagccatacaatgtcataattgtatggcaaacaatattaggtaagatcgtctagcaaacgtctcagaatcattaatccttgttcaagctcttcaagtgtttttggtgcacagacagaaacccttacagccctttcaggacaactattgcctactacaaagcgttcagccgcatacacttgcacgccatgtcgagcagccaactcttcaaattgagcgccagttattttaccgggtaacatcaaccaacgaaaaatgcctgtttcaacacctaaacatgtatatcccgcaacatatcggtttacgatttgatttctgcgaatggtttgttcacgatgactctcaattaagacttcaaattgatttgatacaatcgtgcgagcagtaagttcagctaatagcggggaaacggttatatttaaattataaagcgcctttgatattggctccttatattgtctcggcactgctacataagccaaacgcaggcctggcgctaacgattttgataaacttgcaatatgaataacctgttgcggtgcgaatgaggcgagtgccggaagcggctttttgctaagaagatggtacgatgcatcctcaataacaaacagattatatttctttgcaatgtctgcaaccattcttcgattctcaacagacataaaggaagtcgtcggattatgataatccgggattaaatacaaacctttaatattttcgtttttacacgcatattcaagtgactccggactcatttcatcgttctctgattttatcggtacgatttgcacactaagcaatgatgcaacagtttttaatccagggtacgtatgatggtcaactccgatgcgatctccaggcttacaaagactcgccaatgtcgctgcaatcgcattttgccctccatttgcaaataaaatgtgatcaacggatgtttcaaatccgcctctttggatgagctttacagctgcatctttttgccaaaggctttcgccagcccggccgtagctaaaccatttttcataatcctcctcctgaaccatgtttttcagttggagtaacaagggctcatatgaagcgtgatctggaagtattgctcccatttcaattaaatgtgtcggctttgtatcctcaagtaaatacgcattcaacaacgcatcatacgatacaaatgtgccgctccctacagtcgcactcagcagcccctttaactcacacactttaaatgctttggaaatcgtactcacatttaaatctaaataatcagccaattctcgctgcggaggaagttttgttccaggtaataaaactccgtttaaaatatcctgttccaattgccctgcaagtgctttataaataggcttttcagctttatcaatcgatggcttccagctcatcggatagttttcaaaagaattgataggcatgatacgcatcctttttcactcaattatatgaatgtgccgtttataagacaattataactttcttttattgatgcctttttatgaacagcatgcttcaataaaacctgtacaaatacaagtgaatcacttactttatttcatataagtcatcctgcaaaactgtgcacagaatgtcggataaatacaattcactcctgttattctttggttaaaggaggtcaaataaatggatttgcttaaaagtatgaatagggcgttaaagtatattgaagaaaacctcactaacgatattgattttcaagaggcagcaaagcttgctttctgctctgaatatcattttaaaaggatgttttccttccttgcaggtatttcattatcggaatatattcgtcgcagacgtcttactcttgcagcttttgaactgaaagacagcaatgtaaaagtgattgatattgcaataaagtacggttataactcacctgattcttttgcacgggcattccaaaatttacatggcataaacccatcaaaagccagacttaatggccattcccttaaagcttatccacgaatgaccttccagctaacaattaaaggaggaaatgaaatgaactaccgtattgaagaaaaagaggcatttcgcatcgttggcattaaaaaaagagttcctattatttttaaagggattaatccggagattgcatctatgtgggaaagtttagatgaaaaagcaataaataaactaaaagagctttctaatgtagcaccatcaggactcattagtgcatctaccaatttttctgaaggtcggactgaggaaaaaggagagctcgatcactatattggcgcagccacaacgaaacagtgtccagataatttctcacggcttgaagttcctgccttaacgtgggctgtattcgaatcaatcggaccatttccggatacactgcaagaagtatggggacgtatttattccgaatggtttccatcgtcaaattacgaacaaatagaaggtccagaaatattgtggaatgagcataaggatgtaacatcaccatcttttaaaagtgaaatttggataccaattacaaaaaaggaatacgttttttgatcagagaagaaaaattgaaggttcttgaagaaaaaataccaagggcgtcaaaacccttggtatttttgatattgccgagagggctcaaactccaccagtgtttttcattgccggaccggtcatataagcaaaaaaagcccctatatatcccgatttgcatgattcctaatctttaatatcgacttttcactctgcatagaaggctctttatgtaaagccaatattaaagttatccctataatacaaatagcaccaatccattgaaaagaaccaaatggcgcttttaaccaaacgacagttgttacaacagcggatagaggttctaaactgcctaataggcttgtttctttgggagaaaggctttccaagctttttatgaagaaccagaacgcaatcattgttccaaataatatcacaaataaaatatatgcatacgcctcagcagttaatcgttgaaaatccagttgccatggcggatggataaaacccaatgcaaaaccgccaataatcatagcccaacctacaacgacaagagaatcaaatttatgtaataaaccaacggcatataaagtataaaaagctgccgcgaatcctgataaaactccccatactactgcagctgccggcactgaaagttgagacattgaaccatttgttaacaaaaaaaagcaacccactaaagcaagtacaacagtaatgatatcttgtttggtaagaaccgtttgttttcgtaaaagcgtgtagataatgacgattacaggggataaatattgcaataatgtagcaacggcagcattcccatgttgaatggatgccatatatgtgtactgcacagcaagcattcccaataggccaaaaataagtagctggccagccgacgctttgtgtttccaaacctcaataacctgagaccggtcctttctgaacagttgcagcattaaaagtaacattccagccgtaagcaagcgtgtcgttacaagccaattgacatcgatttgatattcttgaaaaagttttttggctactgtgcctccaattccccaacatgtcgcccctgttataacatagaacaatcccattcttctattggaagtattcatacatgactcctcactaataaatataataatagtgttataataaatgcaaaataggataaaaaatactcaaatcgaatgaaaaaatataaatatattgaggtgagaagtcagaatgaagaattttgtgatcgatcaaaatttaaaagaattaacagagcaccgaacggtagaattaccagttgcctgttacaagacaacgatcaatcaaaatataaatggctatattccgcttcattggcatgatgaaatccaatttgttttgatactaaaagggatagctctctttcaaataaatgaagaaaaaatagaggttcacgaaggggatggattatttatcaatagcggctgcctgcacatggcagaagaaaaggaaggctcggattgtacgtatatttgtttaaatgtgtcaccccatttcgttttatctcaggaactgtattcaagctatgttcagccctatatgttttcaaccaatttgccctatttatttttggatggaaatcaacagtgggcaaaaaatattctagatgctgttaaaaaaataaatcaattgattcaacaaaagacatcgctctatgagattgacattacgatgcaattaacgttaatgtggaaaaacatggtcgttaatggttttcaattagagtacgatcaatctgaaatgataaaaagtcatcgaatgaaacaaatgttaaactggatccatctccattatgctgaaaaaatcacattagaggacattgcaaaagctggccaactgagccgttctgagtgctgccgttattttaaacgaatgctgaataagacgccattacgttatgtaatggattatagaattcaaaaaagcttattattactgcaacaccctgaatccaatgtgacagaagtgtcttatcaagttggatttaacagtaccagttatttcataagtaaatttcaacaagcgatgaatatgacgccattatcatacaaaaaaatgaatttataaagtttattctattattaaatggagtccccttaaggtgtttacggctttaaaaccaacattgtataatgatagtcattcttgaaaatcgaggtgatcataacatgtttttagctccactatttgaaaatgatgttccagtagcacttctccgcccttaatggagtaaagtgactacttctctccgttagggcatttattgacctaattttaaatacggagggaacaaaaaaatgaaaaataccctgttaggttctatatatttagctttagccgctagtatctggggtggcatgtatgttgtggttaaggttgttgtcgcagtaattccgccttttgaattggtttggatcaggtacgtcatcgccatccttgcgcttcttattgttggtttgataaggaaacaatcttggaaaattcataagcgcgaccttttattaattgtggccattggaattgttggcaacaccatttcaattgttacacaagaatatggaacgatgttgtcttcagcacaaatgggagcaattattacgtcctccacaccagcgttcatggttatttttgctcgtctattacttaaagaaccattgactatcaaaaaaggaacctcaattattttagcgaccataggtgtattctttattgtgggaaacggacatattgatacatctcatcagcttggcggtatttctctgcttgttgcagcccttacatgggcacttatgtcagtgctgatcaaacgcgttccaagcagttattcaccaatacttgttacaacatattcaacttttgtggccattgtggcgctaactccttttgtaaaacctagcaccatttttacatcacaactgcttgaccctaaaattctaggtggtcttttgtatttgggaattgtttcaaccgcttgtgcttttttattgtggaaccgaggcttacaattattaaatgcctcaagtggaggcctctttttcttttttcagcctctggttggaaccttactcggatggattctgcttggagaacaaataggcgggacattttggataggttcgtttttaattctgagcggtgttttattagtcattaaagagaaagaaaaagaagtgaattcataacaaaaagaaaagcaaactattttatatagtttgcttttcaattaaccttgttctttccccttcacttctttatgttctggtcttcatttataatctctcctttctttatttttcttctcacctcaatacccatttgaaggttgtcaatttccctgataataatgccaatttggtggctaaatgtttatcaacaaacctttttctgttcgcaagataagtgaaaatgcatcattaagtaagtgggccgttatccatatcaaatcggtaaagaaattagaacttaatcatgtgcttttattatttttagctgacatttcacaaatatctttccttcttatttctactcaaatcatttctgtaatgtcattgagccaagtcatgaattcctaaaggaaattgaataacccattttcaatgaaaaactgatctatgttaattagtcgaagttttaggatatacacggatcaattgaccttttccttgattggaaatccgacacgttccctattgtttttgcttgatctgttttttaaaaaaagttattgacatcaaaaattcgatcatgttattattaaaagtttgatattccacctccatatatggtaatcttaagaaggttaccatatatggaggtggatgatatgtttcaaattggcgataacattgtttatccaatgcacggagcaggtataattgaagccatagaagaaaaagaattcttagaggaaaaacaacagtattatgtcataagaatgtcaatcagtaatatgacagttatgattccaacgcgtaaaatattgagttcgaatatacgaccagttaccgatatacttgcattaaaacacattatgcacatttttcagcatggagaatcagataggttactgccatggaagcaaaggtataaaataaacacggacaaaataaaaacgggtgaaatacaagaaggcgctgaagttgtacgtgatttaatgcgtatgaagaaagaaaaagcacttaatgcaagcgaaaaaaaaatgctggataatgcatatgaatttttgattagtgaactggaagtaattaaaggaatcactgaaaagcaaataaaaagtttcggttagatagtgtattgatcccaaaaaatatttcggaatattatgatgaaaagcaaatcttctccaaattatgtttagaacattaacgacctcttttgttattcctacattctaatccatttttattatttacatttcttctgcgaagattgaagttttaccaaaaaactcaataaaatagtcacttgtttttagtatcctgattcacactggcacggacaaggagccgtaaggatggaagagaggtagggctttcattgttttaggtatctctaagtgattatttccagaagaaaaaaaacaatcgatctcctcattatttttaagaatttcttatatccactgccacattgaataataattgttcatcttcttttcataaaaaagatatgcgagttgataacatccagatgaaaccatttttataattcatctaatcttacttaaatgaacgaacaggttagtgaaaaaaagagttatatttgaacaaaaaattaaatattttatatacattccgcatattgtcaatccagtatgttatactgtaaacaaacctttgaagttttaaatctttttctattaccttgtagcatctccctactcgaacgttgagtagggttttttattgagtatgagatagacataaaaaaacaggccctatataaagagcctgtttgtataaacgattgaagattaagctttttgaacgttagcagcttgagctccacgagcaccttgctcaacgtcgaacgatactttttgaccttcgtctaaagatttgaatccgtcactttggattgcagaaaagtgtacgaatacatcgtctccattttcgcgttcgataaaaccaaaacctttttctgcattaaaccatttaactgtaccttgttccatttttgttgcctcctagtgtgtaaccacacagtatatactatccttgcccaaagtatcatcaagacgaaaagtcaatcttcatactatcctttacaccgaacaaaaataattcttctttattatatcaggtatcggaaataactgcaaattaatattgatggcattatttgttaaacttgacctcaaatcatctttctttgctttattaggaaattcaactcaatcgcaaagccccctattcgggaaaatcatttccagcaaattaatcaacaaatggatttccatatttatcacaaaaatgataaaaaccataacgattcatatacatcattttctctatgttctcaggagtatcaaaatcaatcatctctaaaattaaattagtaaattcaataggggcagttccattagcagtaaccaaatttttatctcttactgcttgtttctctacaaaactgctaatcggtttatattgtttgtaatctttccataagtaaacaaaattacctgtatggctatgattattcagcaaaccattcttcgccaaaaaatccactgcaccgcatatcgctgctattggaatgtttttttgaaatgcagtttttacaaaatgtaatagttttttattgtcattactccaggaatccccgccaatcataactagcaaattaaaatttgcaggttctaaccctattatgtaatcgacagatgttttaaaaccacctattgagcttacaatagggtctaaagaaacagtgtgaaccgaccaatcttctctttgatttaatgcagatgctaagtaaacaccttcccaatctgcatactggtctaatataagaaataacgcctttttcacaactatataccgccttagattataagttttttattatccaaccttttcgatttgttacgaagaaaaaatactctatcttccgtacctgcccttccccaacaatttggggtcaggtgagtgcgataaagaggagtgttcatcacatccctgtaatctttgagtaacgtttcctcttgcaacattcatacgataatatttcatcagaaagcattaaatctcctgttcatgaaaataatcaacgacttcaattgattatataagctgtaatctccaatttgtttcatttttcaaggaataataaagaaggatactacataagtaacatccttctttcccaactttatgacttttaatttgcttgctgtgcttgttttactgattctttgctaaaaagtccaacaatattccacaacacaattacagaagctattattaaacgagtagtactgacttcttggttagtaaataatttataaccatatattgatcccaatgctactatacaaaaaacattgaaccatttactccaacgcaattaaaaaactcctttttaattaattacatctccatacaatctgtatacatttattatagtaccagtattttattgaaaatatataaaatttttcaatatctaatcttaaacctttcttaactgatcctacaaatcattactttcacacttgttacgttggcaaaataaaaagaagactacacgttgtaacacccttttttatgctttgacttccatataaacttttgagcttggtatcaaccgtccggctaatatcttattatttagaatgtgtagcgatacatagaaaaactaaattagcaagaaaaaaacatgttatatcaaaattgaaccaagttttttccaagattcctcagacgtgggattttacttctgtataacaaaaaatcactttgtcctttataaagacaaagtgattttaaaattagctattaggtaaatctacttttgcaggagtacttgtccaaggtttgcccattttctttttatgagctttatcttcaaaaaattgaactgtagcatactgataccaactatcagtcattgctcctttttcgtataaatcatatttataatacgcatcagggatttgttcttttgcccaataagagaataaaatagtggcagccttactcccccatcccaagccagggacaataccgactaatgacattgtaactgataacgcatttttagctgcttttgtatgcccagataaagtccccacataatggtatccctttttaggttttgcagcctgtgttgtgaattcatttgatttcaaattattgttttcataatttgttcttttagcaacattttcatcatactcaaagtttaaacctttttgttctatgccatcgacttttacagtatgatcatttccgttcatctgaactttgtgagtttcatttccactcacatactcaatttcaactaatttcccgttcgatgaaatcttttcacttttcattttgtaatgtagagctagttcttcgtaagaaggggttgtcttagagtcctcctttgcagaagcgtaacctgcaggtaaaagtgagcctaaagtcaatgatgcagccataacacaagtaataactcttttctttctcaattgaaatcctccttgtgttacaccttaagaatctgaattactaaatacttgcttaattttataagcaataacagcgaggtataaaattgcaacaaacactaaaactccagtgccataatcagtttttgcaactagaaaaagacttaacacaccgaaaataatgtacattacaatatcaaagatatttttcttgttgttcatataaactcccccgtttagcaattgattccaggtgcatatttgattgcagccccagtgtattaaacacttacaattttgtccaattgaaactctctggcaatattactttaatcatatctcaaaataattttttgaattattttcagcacacctactctaacatgattcttttttgatttacataaaaaatcgaaaaattgagtcatttttccttggagaataactgtgtgtaaatcttaaaaaggactattcattcattttgagaattagagatacatacgctaatcattttattttcattaaaatccttttcgtgtttgttgataatatggagaggtgatgaaaatgttcaaaaaaaagaaatctgactcctgttctatgtaggataccgttttttgaattatttggtttggggatacaggggaatatgaaatataataagtggttttaaataactggtgagtattggttagcatacgatcttccatagtcgtttttctgcataaaaaaataacaccaaagatggtaaacccttggtattattggggtgcggccgagcgaacttgaactttacgggttattcaccccactgggccctcagcatagtaaatccatatcattagttatgaaagctcattgcactttctaagtccactttacatcatttctataagtttgtatgaattatggttaataattggtgagcaaaaacctacttcctcacttctccaaatctcattataaaatgatttcatattcgttccctctcctaaaacaattaaaacttcagagacactatctttctcggttattgaattcacataaaatcttttttatatcgaacagctagatagattgctgaagcgaagaatgcaatagaatacttaaataagaagaaaacttgccacatatattcttttgggaaaagcaagtcgcaaaaaattagtgcacataatgtacagaggctaccttttaaagcgatttggtttgttctttcgtcagtcttacccatttttttagtaaatacgaatgtcagaatcaatccgactacaagcaatacaaacccactgccaataagaatattccaatttcccggagaatgttcagcccaggactttaaaggggaaaaaattgcgttggtgatcgtatctgtgatcgaattcattttcatttttgatcatttcctttctcataagtaaaaatctcgtttacatccacattaaaaaattcggcaattcgaaaagctaacagcagagtcggaacataatttcctttctccattacaaagatggtttgtttggaaaccccgactttctttgctaattcttgctgagacaatctggcaagtacacgatattcataaaccttatttgagatcgaatcaccaaaatctttcttcatgaccatcacctcttgaaccaaattataaatccaccttatataaaagtaaagtaaacttatacaaaaatataaaatacttttatgtttacttagattactttgatttaatcatgaaccagaatccagaaagaacctgacgaaattcatgattccgtcatgttcacttatcaatctggtgtaatttgtggttcttggcggtacattttatgatattcaatgatgcaacaggtgatcaatttccaaaaacaacagtaaacggttctgatggtgcaaaccgaacaacaattcttggttatcactctgaagggtagacaattttaaaaataagcacaaaaaataccaaaggtctacaacccttggtataattgatgcggccgagaggacttgaacctccacgggttattcacccactaggccctcaataaagtgaatctgtgttttctgttataaaacctttatatttcagtgtttatttattttgattataaggttttataatgatttattcttattgaggagtaaaaatggagtaaccttcttttttaaaaaagttactttattattgatattttacttagtaacagcactgctcgaagtaatcagttaaggtgaaaaattaagatcaaacatgaaaaatagcaggaacttttcacctgctttattaattattcccatgagagtttcttagttttatcctaaacttgaaaaattctttttattacattaggaataacaaaagaccgcttgatttctttatttacttgtataatgtctttttgtgttttcccattctcttcccaagtaacttctactgtataatcattattcatatttggtggatctcccattatcgctactgctatttttttagcattcttaggttcatctgttgcgtcacctgatgcctcaacaacaccattttctttaaacacaacctcttttattgaaaactcagaatcccttttccatgtaatatgaaccgcccataagtcttgccttgcaagatctatgtctttttcaggagaatagataacactccattttccatcttttgaattacccttcaaaataggaggttggtgggtgccagcataaataaaccatgctaaaaaaactagcagcccaacagaaacaatactcgctaaaataaacttactttttttcattgttaactccaatctctatatgtaataaatgggatgtaagcttattttacaccaatgaattctcatttcgttcaattcattacctatccttaaataattttttcgaacttcataacttatccatggtaatatttagatataaaatcactgaaaggattggacaatgaaggtatttgaagctaagtctttgttatctgaagctgaaaaccgcgcaaaagattataaagaattgaaaaatcaaatgattaagctaagaaaagcatttaaggctgttgccgatcttgatgacagtgagttctctggcaagggagcaaacaatattaaagctttttatcacgatcatgtgggtgtcactgatcaatggattgatttaattgaaatgaagatcgctttccttactagtatctccggtgttttagaagatgccagcttatctgacgcatatatcgaggaatccttcttagaacatgaactaacaaacgcatataaaaaatcaaaatcaattatgtctgagcagaagaaagcaatgaaagatattctgaatgatatcgatgacattcttacacttgatttattttcaacagagacttttaaagatgaactctcttctgccgaaaacaaacggaaaaagactgttgataaaataggcgatgtggatgaaaacttaaaaactgaatatgcgataactgaacctaacgaacaattcattaaagcagactttcaaaagttacaggaatcaacaggtaagggcaagaatgctacaccccttcactataatgccaaggcatatcgtgagagcgatatacataagaaaaaaggcgatatcgaaaagcaatctgaagcatatttaaagatcaaaaaagaggaagctaacaaatgtgagataaaagatttgaaaaagcagcttgtaaaggtaacagatccagacgagtatttaaaaattgcgaagaaaataggatacgagaatttggaacctgagcagcaagtttatttccgccaactcgaagaactccaacaaaaagctgaaattggaaaaggtattgcaatgggaatgtatgaagcaggtaaagatacagtgatgggtctctatcaacttgcaagacacccgattgaatcgctttctggaactgtgaacgcagccttacatccaatcgatacttataagatcatagcaaaagacatagaagacacatttcaacgtgaaatgattaatggagatagccacagcagagcaaaatgggtttcctatgtcggcagtactgttgttcttgcaatagttggtccgaaaggtattgataaagtatccaaagttgcaaaagccggttcaaaagttgctgcacttaagacacttgaagtttcaaaaacaggaataaaaaaaggtattgaatacgttaaaataccaagtgtttttgaacaacagttcgcaatggctggtggttcagggacttttccttttaacgtgcttgatggagagaattataaaaactctgcacttgaaatatttaagaactcgtctactgtacaaggattaaagaaagctaaaccgcatgaagttgtaaacgaattaaaaactttccaaagcagaaaatacacttttggaggacaatcattcctcattgataagcgaggaatgaagcatattttagagcgccatcatcctaatttatgggatggttcaattaagtctcaacaatcttttctcaataaagagatgactgttaacgatgttgcagatgcgatagaatcaattatgaaacaaaaccgtgaagagttaacgaaaaaaggaactaaatttagttatcaaattagaggatcatatgagggtcaacaatatgttgtaggctttcaaaaaggaagagtaggacaattctatccggaaaaataggagaggtaaaatgttttatattgaatcattaattcttaggccaaataagaagataaacgatctttcaatcttaaaaaataatattgacgattactttgttccacttagcaatatagagggactaaagaacataaaaccacagttagactcttactatttatctggggcgattattttaaaatatggtgaacaagatttgcttgatgtcactatgtgggacttggttgaccaattgtgggcttattttttaaatctaattgaagaagctattgaaacaggaaaaagcgaaacttattttccagatcaaccccttctattgaaaatgaaatcaatatcgaacgatatgttgttatttgaaattgaccaaaaacaaaaagtattactaccgaaacttgatttttttgaatcactcttaaagaatgcaaaaagtttctttgaaactatgaattttgttttagaagaaaactgtgattatgaatacgaacttaataagatcgatgaattgcaaaccaaaattaaatgtatgtgaggctaaatgtgaattactctatcgtgaaaaaattctttgatgagaataaaaaatattcaattcttactggaggcgtcactgataaacaagaatagaagagcagaagataccacgaaattgtcctctcgtcctcaagaatttttacttggagatgagagtttattattgcaattttaaattttagagaggggaaatcaattgaatcctttgttgttagatgttcctttacaattagaaacagaaagactaattcttcgagcaccacatcaaacaggagacgggaaaattgtaaaccaagcaattagagattccttttctgaattaaaagcgtggttgccatttgctcaagaacttcctactgttgaagaaacagagataaacttaagaaatgctcatataaattttttaaagagagaaagttttcgttttcttatttttgataaagatagcaatgactttattggaataactagccttcagagaattgactggaacattcctaaatgtgaaattgggtactgggtaaatactaaatatagcgggaatggatatatgacagaagcagtaaaaaaattagctaactttgggttacataatatcaaatttagaagaattgaaatcagatgtgattcaacaaatcttaaaagtcgtgctattccagaaaaattggggtttgtattcgaaggcactttaagaaatgatgatttatccgcagatggtagcaagctgactgacacttgtttttattccatagtaaagtaacattgtgaacatttacacttaaagtagcgaatacgttagtagaacaagaaaggacataacatattttatacgactaatatgttatgtcctttttttatcttattttttaattttggtcttgataaattagtctattcctctaaattaattcattgtacgctgacagtgtgcttttgatctgaacgagaaggttacaaacaaaaagaaatggcggacaaattagacgacttactttaagttagtggacacttttggtcacaaaacacaatttcttcaaagactaaaaaaataccaagggcgtcaaaacccttggtatcattgatgcggccgagaggacttgaacctccacggcttattcacccactagaccttcattaaaataaatatgtgttttctgtttcaaatcccttatatatcaacttttgtttattttgattatggtgcttacaattatttattcttatttgggagtaagattttaatgagcatcgactataaagtctgagttcttttccataattccgcatgtttttttactatatttataaattcagccatcgctaaggaattccatctttttttatgatatgccacctgcgttataatacgtgtttcatccataatcaatccacttaatttgttttctttcaactctttttgtacagtgatcaacggtaataacgaaattcctaaaccgcacataacgcactgcttaattgcctcaacactccaaaattcaaaggtattctccgaaaccagtccttggtgtttcatatactcttcaaagtaagtacgatagctgcacccatgttctgtatataaaatcacttcatcagatgaaaaataaaaatcatcaaatggagtattttgcaacttatgctgtttagggaataccaatatcattggctcagttattagtttttctatatataaatcagcttcctcttgttcatactccaacagaaacgctaaatccaccttcccatttcggagatcatcttttaattcccagcatgtcgatgattttaaagtaattttcactttaggaaaaagctttttgaattcgtgaataattggaggtaaacggtaaaccgttaaagattccggggcaccaataacaagattccccatgggttcatcgtttgattgtatttgttttactttttcagaaatcctgatcatttcgtttgcatatggcaacaaatactcacccacttcagttaacagcattttcttcccaaaacgattaaataagggtcctcctatttcttgctcaatatctttgatatgtgaagttatggtcgattgggcataacctaaatattcagctgcttttgtaaatcctcccttttccactattgttataaatgtctttagatgccgtatttccatcgtctctccccctttaaacattactaattccgatggaaaagttcatatatatctattttacggatgaaaggaaacaaattacaattgaaatatgatcgtaagacacgtttaggaagggatggaatgaaaagtgagagaaaaaaaacttggccccgtacttttaagtggattaattgttggtcctattttgggatcgggaattattttgcttccaccaataatttatggtaagactggggattatgccatattagcatggtttattatgatgatcattagttttctatttgcttcattgtttggaaaattaagtgttttattcccgaatgaatctggtgttgcacatacagttgaacttgcatttggacaacatataaaacaattaacttctgtattttttattattgcgggcagtgttggaccagtagccgttctaatgacagccagtcaatacctcaaggctttattcaaaagtaatggttggtccctagagacatatggaatcattctaatgatgatttgtttattcgttctattatcgaatatctcttccgtaggaaaagtgtcatttatgttttccacagtctccacagtagtattgttaagtggagggattagttcaattccctttatgagggataaagcttttattaaaacaccatttcatcttgatgattttggttatagtattcttttgcttttttgggctctagtaggttgggaaattataggtaattatagtttggatgtcaaaaacagaaaaagaacgattccccaagcaatagtaataagctcagtggtcatcacaacggtttgtattgttgtagctgctgcctatcaatggattgatttacatcacacacacacattaacgattattttaattccattgcttggaacgtcgtttgcttccccgacaatggctttcatcacaacaatattatgtatgagcacatatttattggttactggtggagtatcacgtctaatagcctcagagaataaaaaaataaccttgatttcttaccgctccaaaacaaacataccaattggagccataagcatattaacattagttcatgcaatcgtttttattcttttatttataaacatcattaatgttgaacaaattgttggaatggctaatgctttctttattagtaatgcaatttgcggtattttgtctgcatataaactgttacctggtaagttttcaaaaagtttatcattaatgcttattatcagctttttgattatcctttctttctcatcaatatggattttattaatgattgcccttataactactttctatttgatccgacactttatctggatacgtcaattaaagaaatccgctactaattctcaagacaaattgcgattttaagatcatgaatttctcacccaaacttggatgtataaacaaaaacgagagattttacagttcctttaggacatagttccgtttctttgaatacttccggacatctttttcctaataaacagaaggaaactgccgaccgtttggatgattactttaagtaactggtgagatttggtgagcaactcttctctcatagccgtatttccgcacaaaaaaataataccaaaggtggttaaacccttggtattattgagatgcggccgagaggacttgaacctccacgggttattcacccactaggccctcaacctagtaaaagcatatcttcatttacaaaagcctttatttatagcacttagttatttggtttacactgattttcatgatttgttattaattctgggcagaaaatgggcactatcaaagagatcactgctttctgcaaattttaactaaacagcttttaaactagctacactgaaaactgatatcgtgtataattcccttataaaagaaaataaagaggggggagcttatgacaactgctactgaagaaagaattacgcaacatcagtcatacattactttgcaggaaatcatagggttgttggaaaagattgaatataatgatctgcctgataaactacaaataccatcacttgagagaatcaatgaaaccttgacatttttaaaagactcattggatagagtatatccttccctagtctcaattaataccttaaataacttacaaagtcatttatcaaatattagaagttatattaatagttacatttcaaatcataaccaaggaggatatctaaataacgctatttcccaaattgaaggcttattaccctacttaccacaattgaatattataaggacttctgatgatattgaaagtattaggaatactactattagcttcaaaaaatctattggtcaacatttatctcatttagaaaaagaagctactgaaacaaaggcagctctatcaaagagtgctgaaaaggtacaagaacttgcagatgctgttgataaacagaaaactcgagttgatactgtcatcagtgattttcatagtcaatttttatctgcacaaacttctagaaataatgaatttaataacttcattaaaagcagtgaagaaaaaaatcaagaaacctttgaagaactagttacaaaacaagaggatattttttctgagttaaatgataaatatacacagaatatagatgatcaagagaaatcctttatcgatttagtagagaactttaaatccgaaatccaaacacaacttgatgaaataaaagatatgaataaacaggctgaaaagatattaggtacgatgggtgttaaagcccttgcccaaggttatcagagaatcgcaaatcttgagtccaaaaaagccactctatggaatagcatttctataatatcaataatcggtgtcctgtgttttggatatgaatttatcattaagcatagtggagaattgtcatggcaatctacgattagcagattggttttaactggtgtaggagtaacgctatttacttattgcgcaaaacaggcaacaaatcatagaaatgaagaaacacgcaatagaaagatagaactggagcttgcatcactcgatccgtatttgaaggatttcgaacctgataaacaaaaagaagtaaaacaaaccctcgttgataaatactttggcgttgatattacaaatgctacatcacagcaagacctttctcctagtcaacaaaaagctattagttcacttatgagcaatcctgaattcataaaaactttaactgaaactgtaaaaccatttgtcacaaaataagagaagagttatttctcttctctcttccttttaactatttaacaacaatactttatgctccaactctatcagcagctatcttaatatttttggttaaagaatcatcttcaaaatgtgtaacagagataatactacctaaaatcactgctgccaatagaatccggctgattttcattaataatctccccttttttaatttttcgtcttgcttcaatactcatacgataatattcattagagagcattaaatttccttgttcatgaaaataatcagcgacttcaatcgaaaaattttcaacatcagcaaacatttttctcgaagttagatatgaaaatgcattctttattaattgattctcaccatcagaaaaaaataatccctctaatattttgaatttcgctgagtattccttatcatcacttttatcggcaattaatcgacctttcctaaagtatgtcaaagcaacatcataattttgttgttttgcttcaacgtaggttaaagtgaataaagtctttgttaggaaactatgttttgatttttcaaaaatttctaaagccaagattaaatgttgtgaagcctttttatattctttcaattcatcataacaaattccaatattcatgtgtgacattgcaattaaatgatctatattactttccttggagatttccaaagaattcaaaaattgctccaaagctctttcatattctaaagaatcgatcaagtttcctgctacaataaattgacaacgcacagtctggacagcatactcttcatactctctaaatattttgagtgcacgatttgcataattcatagagaagtatgtttgtttcatataataatatacataggacactttgaaaaaaaactctgctttttctatttcatcctcaacttcagacaactttgattctgctattcgataggcacttatcgctgtagttaattctttacgtctaaactcgtacatacccttaaaaaagtaaaaatagtattccaacatgccggttaattgcccttgcttctcaatttcttttatagtttcataagcattatggagatcttctatttccttagaattcatataactcagcattatctcgtgcctaaattccaatagctgataatataacaatgcatcttggttttcttccatgtttagtaattctttctctacttctgtttttataatctctgctttttcaacttgatcattttttattgatgtataccattcatttaacttttttgtaactaggtcgtacggaattttatctttatctaagaaaacactccgcaagaaaattcccccatccttacataaattgtgagaatatttacattaattgtattatgtcagaacaccctttattttacaaagatgaattgcaaaaaggtacattatatctactcctttgcggtttttttgcgggtatagcaattctttttatacttgacagtgacataaggatactataaaacgtaaataggtcatatttggtttatttgtaaattccctaaacattaactgaattaggaggtttgaatttggaattcagatcaagggccgtaatcggagatcatataatgttcaatgaatgcatatcagtgttccgtcctgaaaatattaatattaaggaaaatcgtgagttgactaaatatcttttattagatttttgcttaactgaaaccttaaattttgattattttagtattgagccttcaattgaagttccacttgctatgagtcgcaatgcgtatgtaactcctgtaaagttaccaagttggttagaatggagtgaccacccacatctattcaatgtagcacttgctgctgttttttcttttgtgtcaggaagatcaattaaagcccctagagaagatatatctgcagaacaagataaagaatctcttaaagaggttgctgttcattttcctgttctaagtgccggtcctggaaatcataaagttaatatatcgaaaatagaacttcatgaattgtacgaagaattgaaggagataatcaacatcttatttaatctaccatatagagaatatattgatgctatgcaatctataagacttgttcatctggctcatatgaataagagagatgattttggtttagcatattatctattagtttcctcaatcgaaccattctcaactaaggctataaaaagaaagaaggttactccagagccagatgatagagaaaaaaagtggagagaaatcagtgaaaaaatcggtggggatttcgcggaattatttaaagagtacactgcagagaaaaagaaaaataagttgattaataagaggtttgttgaatttatattaaaatattgccctataaacgaatggcatgaattaaaacacccagatgaaagagatgaagaaataagaatagaaaaatataaagaactatatgaagaatttgaactcaataaggagccgccccaatttaggaagagagagaaattgtggtttgaaaaatatccagaagatttaactgatgatgaaataagaaagctacttagtgatttatataaacatagatcgaactttacacatcgtggagagaatccacctcataaacatcataagcccattgaaaaattttttcgacaagaaagtctccctcttaaaaagatagatgatcaatgggtagtacctgaacccatattatttcctaattatatattagtatcttttatagcaaagcgagctataactaattatttaaaaacaaagctctagactaaccgattagagtcatctaacaaaagagccttcaaagaacatacataaatttataattctcacattgtctcaacccacttttatttttaaaaagaagaattgcataagggtatgttatatctatactccgtatctttcagctaatttatcataaccttttcgaattgtcgccacatatcatgggcaatccttttataagcagaaaaaaagaggagcaaacacatggtttactcctctaacttagtctcttcaccttttgcttcttcatagtctggtgttttctttgataaaccaagtcgatcattatcgccattcattggcataccatccatctcttgatacttatcaccgactttctcataataagtgtacgacgtcagttcacgaaaagaatcttttggaaggtaaaacgcaaattgaatatatttgccttcgtcataaactctaataagcgcattgtctcgtctatatatggggtcactgtcatcttgtttttctttatattgattgattacatcatcaatcgcaccatcatatttgttgccgccgcatgcagttaaaacaatcatcattattaaactaaggaaaattaaaaggtttttcaaaataaacattacctcctttttcaatatttagtataaacaaacaatttaatcttttccactttttatccatttcccttaacctgcacattatctactaaccaaccatctttatcttttttcatagtcgtttgaacaatcaacacttgattcgtagtaactgaatttgcagtcgttgagatttctacaatgttcaaaaacaattcatgggattgatctaagggttttgaataactctctaaagaaagtaattcactttgcacactgactgtgtgcttttgatcagaacgagaagggaatgcatagtcaaatccttttccagttgtatgcttcttaactgtctcatatcgcttatctatgtccgaataattaaaaaacgcttcaaaaaatgccttgttttccgaagcgctacttgttgattctatatggttcaattccttaattttttctgtcaaaacttcattcttatcctttaacttttcaatcttatacgtttgctgtccattcgtgaaaaatcccgtcagcaatattaataataaacaagacgaagcccatacaatatgtgttttcatattttcactcctagttatttaattcgtccaaaagatacaaggtgatctctccaataacctgatttcagatcagaatattcgattccactgtcattcgaattaaacattctgccattgcctacatagatgccgacgtgagtaatggcttttccttcatatgtgccaccaaagaatactaagtcacccgcagtcgcttctttttcacttattttctttgttgccccatgttgttcttgtgctgttctaggaagagtgattccagctttcgcaaaagaccactgaacaaggcccgaacaatcaaatccagttttcgggtttgaaccaccccaggcatacggttgcccttcatatttcaaagcttctttcatgaccgtttcatagaaatccatagaaccattcacaggcttcacatttttatcagagcctttcacatacctcatgacatgatcaacataacttgggtcaccgtagcttttccagcccattttaaaagcttgcaaacggctgaaatcaagtgccaatttctttgtgtacttcccgccattctttttgacatagtctataaatccagaaccaaagttgtatgcctgtaaggttaaacgaacatcaccgccagcctgtttaaaaaccttcttaaaatgtttaatgcctacttcaatcgaacgttctgggtcagttatggagttaggaggtaagccgatactttcggaactttgcatgatatctaaagaacgcccaccactttcttgcatggtgagcgccataataatattcacttgatcaaaaacaccttcctgacgagcgtacttctcaaatacagccctaaatcgttcgacttccggtgcaataccaaccgtttcatattcgccatcaccgccgcctataaaatcgtctccgacttgattctcccttgaaatcgtcataaccactacgatacataaagcaaaaaagaagataaaaggagccgagaacaccaaaggaagaactacctttttactcatcatcttgttctttcatcccttctcagccgatcttctacttttgatgaagaacgtcttgcaatttcatttaacgatacttgttcaaatgtatttacgttttgttcagttcgcttaatcgtttgtgatgaaggctggttttctcttaaaacagtcttactttcagcaggtgcatccgtctgttttttctcagcacgaataccatctgaatgaacttttgcgggttcagatggtctggtttttcgttcattattgacaataggttgattctctacttttgtaggttgggagctttcaaagcctttctttggttcagtttgactcgttatgattttttggtctgaacgtttgatgtctgctgatctctcttgtgctacaggttcactcttggaaactgaatcttccttctgaacttcaaagtcatgatgtttttcagtttcatcattctgattttgtccttcatggacatatgccttttggtctgtacgttctgcatctttctcattctcttgtaagactggtgctctattagaattagtttcttcttcatgttgtaatgatgcatcgtcagtttgttgctgattatcgggctgtttaagaagctgttcaacatattctttttgatctgttctagctgattcatcctttttatcttgcaagataggtgctcttttggataactcttcatttccttcattcaaagcatctttcagcataggagagtttataccgtcttttctcaatctgtctaaatgagattgctgtttattttcttttgcatttgcaaaggcttctttttgtttttgcttttcttgttctttcgatagagtttgaggattgcgttttaagcttcggctgttatgactagctattccgttagcagtctctttttgcggggttcttgacatagcatgctcattgtcatatcccatagcagccccactcggtgaattaccgccacttccacttgaagcaccatctacgctatcagctgaaccatcttttcttcccctaaaattctttgcaaaattcgtgaatgtgcctgccgttcctgtacttagtgttccccctacttttttcgcattttcccaagcaggctgaacaacgttttgtctcatattttccaacatattattatcaactgaaaccacttttccagcagtcacaaacttgataatggcatcccttttcacaaaaccaatccaaagaattaaagcgagtacagtaacattcagtagatactttccaaaaccatttggaggaattaacgtatcaaccataaaacaaatgacatacacaaacagaacaatgactcctaacatcgctttaagtaggtaaacactccctaagcgtccaagtgtaacaaatcccgaataagctaattggggaacatacgctaagatgaaagcaaatggcacaaagaacacaatcactagagcgatgatttgaagcaagaagttaaaaaacgctagtgccaaaaatggaacaccaatcacaacagaagcgaccacagcaataaaagactctccaagttgagcaaaaacatttccagtggtcatggactcattttcatatttgcgaatttccgtatctttaatatggtcttttttcgctttctctccatcctcagaaagcttatatgaaagaagtttatcgaccctcgataatttacttttcgaatcgcctttttcattaattttcgcttcactcgtttctccaaaattaacgattagaaaaggtttcattaaagccatgtcaaagtaaaggttacgcatgaccgcaactgtgccttccatttcctttcctttttcaatcgcagaaccatctgcaaaattcccttcatcttgaacaatgccaaccaatccatttcccgcagttaaaagctttccttgtgcttctacagacaaggcattcaacgctttcatataataaccagcatttgacatccaaagcccgccgatcaccatgacacaaataaatagaatactccgtcgcattgcttcttttgcactacctctaacacagaacagatagacgacatagccacacgtgaagatgaataaggcttcaccgaaattctttttcagggttttataaactgatttagaaacgtttgtaatggagtttgcgaactcgtcaatcggttgcaagttatacaaaatatccattcccgcatcaaccacacggacaatatttcccgcaaaagaaaaagtgacgtttgtcagtccaacaaacgcccccttgattaaatcgtcagatgcttcattattcgcttgataacgtgagataggaaaccttttcactttcaattccacaccgccagctttttcgacttttggctgtgttgtggtatcaccatcagccgaaaatactgatacagctgaagcaacagttaggaacagcaacacgatagccgacacaatcaaaattcgtttctttttcattacagccacctcctaatctaaccgagttaataaataaaattggtatctggctttctctaagtctctctgcgttagtagcacgttttcgggatatcgttcataaagagagaaacagattgctttttgatatttcatatgcctgaaagtctttcggttttgttcaatcttgatgcctaataatttttgcaggaactgtgccgttgatttatgcccgataaaacttttgtatcgaccgtcataatgcttcagccattgtttaacttcgtccaatgtgattttttcagctttataaaagcctggactcgtgactacaagagagtttaagaaagctatttccatgtacgattcaaccccttttacaaatatttttcttccgcatatgcgacagcttttttctcgactgtttttaaagcgccttgccattcttcgaataggcattcaattgaaattttagatgtacgcccatagtaatctttaaatagacattgaccttgaaacatggattccatcatttttttgttttcttttgtgacctccatgttcatccatttcaacacttcttcacgttcatttggttcatcaaaggcgaaggcaacgccaaagtttccggaatcctcttctttcaaagcgtcttttgtagattgggaaatgaaatattccgcattgttgtatgaacgaccaattcggcgcatttgtctctcaacttttttcccttgttgtgacgtggtaaatatccaagcttcatctataaattcaacagtctgttcatcttgattcataccgaatagttcgcagaacttaccaagcgcaaacatgacggcactagactttaattgtgatatggtgtagttttcaagtcgctcagcatgatctggcaaatccatattttcaacttctaaaatggtgattcgtttttcaagtgacaatgcaggattggagccatcatgaatacaaagtttcaaaatggaatctgacacaacctcatttaaatagtcaccagctttttgtacagcttcttccggatggccctgcatcttccgaataatatcaagcgaaccgacctgttcgcctttttgttttgcatcaattacttctgatgtagcacgaaggaaagctgtgtttacgtcgtctttccctctaaagtcatatacttgttcaaaaatgacttgaactagctcttttgctttcataggagggagaaaggagataggatcaagcgccccccagttatgcgtgttttcatgatctaacgtgatatagttgtacttctctaaatgtgcaatatataaagggaaattctctcgaatgtactcatcattcaagactctttgaatccactttctcatttcctttttagggtctatatatagagatttgatgttcaacatgctgatatagttaaagatcaatttcgccaaatatgacttgccgtttcccgtatcccctgtgatcagacagtgaggagaacgtgtttttgaaccctttaactgctgattcgctaagaaaggatggaataagacaaaatcacggctggacataatggcactctctaaatcggtgtgctcttggaagcgatcaacccaaccgagaaagaacccgattttcgaaccaatatcagagttaacagcaaacagactttctgccacgccgtcttgtgttgttttttgaatccagttcttatcggttatgtctaacttctcaccaggaagcattttataaaaaagattaagttgatcagccactggaagccgacatgttataccagcaccttttaagtgtcttttaacaatcgttgcttttcccacacattcttttttcgtcttcccatgaacgacaattacagataaccagttcatcaaatgcacttcttctttcttaatctcgtcttgtaaatgtcttaccatcgttgcacttgtgacagtggaaacatcgcttcgatcacctgtactttgttgttctttttgttcttcttttagttgctgttttttgaggttgagggcaggtcttgtgattgattttgattccgtttgaatcttcatttggacttcgacagggaagggaagagactgcgcttcataaaacaaatcactttcagacatgttgtggagaaattcgtcaatcaccacaaaagccgtatagccttcatcttggtcactatgcagatgtaaaaccgatgggtcagtaggatctatgatcgtgtttgttatcgaacgaacatcctttatttcactttcttcattcgtctggtgtttcaatccacgcacaaagtgataacggttaatgtatgtcatttctgattctgcaagccgttctccgcgaacagaagccatgatattggctagtgtttcctcgacttcctcatatttttcaaaaaaagaggtggaaacattttgttcccaccctagcatttttacaacagtatcagtcgccgtactgaatagagataaaatattatcttttagttcgacactaatattgacaagactgtttttcagttttacacctaaaatgaaatcatactttgtcagccttcctaatcgctgttctaacagcgttactgtttcttcattgtagtaacgagccacatccattgcatctaccgcaatatctgtttctaaatccttaaatcgtttttccaattcatactcacttggatacatcatcaagtgaaaatcctcataggatgtaatttcttcaaaaagatgctgccacttctttttatacgattcaactttttctctattttgcataggaatcgaattgctctttattcggtagtacgcccaaacgtcgcccgttcttgtcaacagcaaattcttgtgtattgccttcataggcgtttttagtctcattcgaataatccaccaccttcacaagttttcgaaactcaatttgtttttcattacttaaatcaacctttcggtcattacagaacttcttttgtggaagcttgatgaagaagtaatactttgcaaaatcaaagaagtataaatagatgttttttccttccggctttattttcgtaacaagcattgttaaaaaaatcggtattccaaaaatcacgatgacgaaactgttatcaaaagcgtgaggaaaaatcatcctcacgccgtaccaaaatccaaagcagatacctacaaaaatgaagtagttaatagccggtattaattcaactgcaaaaggtaatgaatagttgtcggttaattgctgaatctttttcggctctctcatcgccttccgatagttgaacaccagacgactcatccaaatgcccccttacaatttttccattagtgcattgatccagccggagaattctgaccaatgtttaataatccaagtcaccgcactgccaatacagcagacaaaaataatgccgcccatttttaatttagtaagatgctttgcggctatgaacatgaccacgatcgtaatgaattggacaacaacatctgatgcccatccttttacccctccaagtgttggaaggtctgcgccaagaataaagaaattcatgaaatccatatttaaacctcctattgatgtttgagtttatttacataaaactgaccgctgttttccgtaatctctaaactgaatttttcatttaccggaatatcattttctttttccttaaatcgaacagcacaaaaaacctcgaaaccttttttcgttccgaagattttcattgactgcacttccccaaataacaagtttccttccaatgcttccggctttttcatcatataaaccatttcttctttcttttcagaagcgtatttctcaaagaaagtttgaaggaatgattcgatagattcttttttctcgcctgcatattcgtctctagtttcttctttactctcagaagcaatattgcctttcagatcataaatctgtgtaaagtaagggacagcagacaccgcaaaggaatcacctttatttatgactggaatattcagcaacatttgtttttcagacttctcgtttgttttaaccttttctttcaccttctttttcttctttccgtctttaacttctttttcaacttccttttctacagggtatagattttcatatgtgaccttatattgaaaaaggctgtttttatcaccttctttcacgttatataagctgtaatctttcaactctcgatcaccttttaaaccatccacattgaagcgttcttcatcttcaaaatggttatcttcttgtttaaccatatagctttcaaggctctgcattcgtttttcaatagattcttgatcgttcttcacattcacatattcattgatgaaccctgacagaaagttttcagcagcagtcaccgaaattttttgtttatcgtcatttgttggcttattcgcttcgtctttcatgtcattaagttgggagcgagtattaattgacagaagcacagcaagcagacagataaacagcaagccccctacacaagaccataatgtgacggctatcagctttgacctgtcacgaggaactttctgtctgtctttttccggtctttcaattcgtttcagtttttgaaaagcagaccgaaaaaaggattcttccttcttatcagagccaatttctttattgagcaactttttcacactccttctgttcaatttgtttcgttctttccaagaaagataaaaaggatgctacacgatgtaacaccctttttatgctttgattctccatataaacctttaagctagtcattcgaccgtccggcaagtatcttgtcttatagaatgtgtaacgatactctgcaaacccttttattcgttcaccttcgacaactagcatgcaatctctgcttaaacttctcacaaaaactaaagatgggatacccacattaaaacccaagcttctgaatcgtttgtctacagcagacaccgcacattttcaccccttattggtagtagctgattccttcaaactccacaattctttcatctgtctcagcgtcttcatcctccagtatgttgaatgtggcttgaagtttcgcattcacgttatctataaccgcaagagtttggactatgactctttgagcaacatcactgtaaaagacatcttccatcattttttcgatcaattcctcagcaatttctaaacagccaagagactccaagtcactctctagtcgggcctgattcaaaaggttaatattaaacatgaacaccccccctttagctctttcaatgcctagaaccacataaccgggacgctgtttgtaatcagtaatatatataatttgtgcttctaatttccgcccagtaaattcacccatccattcatgaagtaccagcgtatctccgagcatatagaacctgtcgttttttcgaatttcaaatttctttacgtcttttaatacagcatcatagtactctggatatatcttaatatgatgcactaccatgacagcacacctttcttatttaatatcttgggtttcacccaaacccaccaacggaagcccgttggattgctgttaatctatccccctattcccccgaatcatcgggggactccctcgccggtaggcaggaacaaacggttgtttgttcaatgccaagagggtttgggtggcgctgaatatgtcaactccttatcctcacttcgttccggtaccgttgacacatacgtctaatcgcatcacctgttttataaagtttagcaacttgtttttaaacgaccatatcagcaacatcagccatatacacatctaacatttttttatgtttgtctgccagttcagcttctgcaatcatatctgacagatcggttttccctaaatgttcatcagcttcaagcaccattttcatagtgggagcacaagagttacgaagccaatttcttgatttctgatagaagtctttttgtggtttgacgtacaaaggaagtctcccaacatcacctataaaatcagaccaaaaaaggctcgttttccaatgctctctagtgatgttttcatcagcatcaacgaaccttacatagttattaatgatctgcatagcgattaaggttaaatcctttgtttttaataaagcatctatagccacttgtgcacgttcatttttcaaccgcaattcataacgattccaatcgcctagttcttctaacggaatgttatacttttctgcttgttcatagtttttctcataaaagcaaaggtacgcttctgactttttagaaccgaaatatattgtcgtcccgcctgtaatgccatcagatagatcaaaggagccattgaagtcggattttctaaagcgcgaaatacattcgcccttttgggctttttttaacaattccggtatagaaaagtacgtctttttatcatcaatcgccaaatcaaagcgagtaaatgaaccgccttgcgccatgcaatcttgaaagaagtcgtaccatgttttcttccggcattccaagaaggattcaaattgacggcaaccttgaccggacatttctatcaaaatacctctgttatcatctggcgcagaataaaagactttgatatagtccagttcgtacgtgccaacgtagccatagaaaccagattgtttctcagtcataaagtctttgctaaggtgaagaacctcttcaataattcggtcaacatcatgagttttaaaagaaactcgaatatagtcaaccattgataccaaaggactttcaacggtttcatttttttcttttacgattactacccccctgttagcgtgggggggttggtttagttcagtcattcgctacgctcattccttcctcgggcgtcagttcggtcgcttgctcgcttacgctgccgctggcgactgccgtcgcctgcgctccctgcgcttcctccttcgcccttcgtatttcttctaaaaagtcatacccacgtggcacaagaggactgtaaaattcaaatacagtacccgttcccatgtctgcatatcctcggccagtcacctttttattaccaaaggctttatcactgtccccaaacatcattccataacctgtctcggacattctgcctacagtaacacgaaaattgaactgatcacgaataccatcaaccaaatattttgcatctggacgttgtgccgccataacaagaaaatagccagcttgccttccaagcatgaccaactgtttcatataggatagcgcttcattcctttctttcatgtccagtaaatccataaacgctacatattcatcaaagaaaataaaaacaggctttaacccgtaataagcatagttttctcctgtcttgtagttaggcatttgtttcatttcatccattcgcttcatcatgccatcaactgattttcttaaacacataaggattccatttttctttgaatatacgttacccgggaacacttcttctaaatctgctaaatcagcatgtttggggtctaatatcttcacatctgcaccatacccagcacatgctttaataacggttaacatatagtaggttttaccgccactagtaccaccagctataagcatgtgcggcaacttatcaaattgccatgaaacatgcttcattaattgcataacaccatcttttgcaacagcttcatcaattgaaatacggttctttttgacatcgtaaagaagcttgaagcagataaaaccttcttccatttctttatcaaccatgtcacaaaataaaccgttttccaaatcctttcctaactctaggaagcgattctgaaaacggctcatgtccatagcaatacggatataaatgtgattgtttttaacttgataatacatcctaggaaaatacgtgattttttcctttgtccctgtatcatttgagaatagctttttaaccttcacattatctttttcataaaacttgttagagaaaatcattcttgcaagcatttgcctgtgctttaaccttttaaatagtccattaaaagctaaataggcaacataaacacttccaataccaatagacaacgaacaaatcaagcttttaacgatcaaagaaacattccatttaaagtgatgaatcaattgaaatacatcaaagtgaagaaggtgatctctccaaaagataaacattgataacaaaaaaacaggcacaaatatcattgcgcctgctaaaattaagttattcctcatatatggacgaattcgttttcctctatacttccagatccttttctgtaagaaatcattcatacacatcacccgacatatggcttaaagagagcattttactttttatcattgccactagttgccgccgcaggtttcacagaagaaccgccttttacaacaatatcatcagcttcaagtttccacatcacattggcaaaggttgaatccctttgactagttgctatagcgctaatttttgggtttttcaactcaatgtcagcaaatgcagggatttcttttgctccagcatactcaggaattgttacctcaatttgaccaccttgaacagcactagcaatgttataaaccctagattccagtacgtcagtacgcttattgttttcacgatcataaacatatctttctttattaagtcccatgaatttcatttctccaaaagtcatattgatatccggtacaataaagtttaagttcatttttcatatccccatttcattttttattatttattttcaagagaacattaaatttcgattttatattttggattcgctccggttctgtatccatcttggcgcttatcagttgctaacggctttacgccctcatggcaacctagtaggctaattatagccatcaagctgactacagctattccgcacgcttattctagcctgctacagcatttaaagtgattgctgttcatcactcaaatactcacgcatgacatttcaacaagaataccgtataataaaagtgtctagtttttattttccggcgttcttgatgattattcgtcaaggcgctttttttgtttatatatagttttcaaagaacaaacactcctagcgacataagttatacagatcatcgttatataaagtaaacacctgattttccttcctactcattggtcgagtagaccagatacaccaccaatcccagccttttaacagctcagatatttctttattagccttcaaataattatcagcttcaacaacgaatgtttcacaagtggcatactctttaaaatgatttaaatccttatcagcctttaaagcttcaacatcagtaatgattgttgcattcactcttattttcatcgcatcccccctttcaaaggattcttaacggctccctatagtggtatataacgtcacactatggatgattgccgaagcttttcaatgtcttttcttccaatgccgtaatgcttacatatcctgcgatatgaaacgccttttcgcagtaattcattaacattttcaattgttaagggaaggtttaaataatgatttatgatgactgaattcagagcaattttcattcgtgctatccaatcaccttccatttgtctggctaaaggaacagcttctttcataaacgagtttgttatatcaatgtttataaaaatcaccccgtttgagattttggacctttgtaacaataacactcttcaaacttagctctactcaccttaccttgaatgaccatatatccttcttctttcatttgagcattcaaagttcttatgatgtcataagatttagcctgtttaactccaagaattttttgaatatctctcgcagttaaaaactctcctttcaaaatatcacctcctcgttaactcaactctttgtgaattaactttattataaaactccttttcgtgtaagtcaacacaaaattcaccttaaagtgtatttttttgaacatatatggaaatactgataattaaactctccataaagaagaaataaacactcctaaaaggagaattttgaatcatttatttaacttataggtgaaattaatgaattctccaaaaaatgttgttattatttttataaaaatcaactctttgtgaaatggatgataaaaatgagcctaggcaaacgattaaaagaagctcgacaaaaagctggatacactcagaaagaagccgcagagaaacttaatatcggtaacaataacttatctaattacgaaagagattacagagatcctgatacagacacactcttaaaattgagcaacttatataacgtatctacagactatttattaggaaaggatgaagtaagcaagaaaaacgaaactgatttactcaataaaacaattaatgaagccatacaggaattaaaggatgaagatacactcctttttatgaatgatggtgaatttgatgaggaaactgcacgccttgttaaaaaagcattaaaaaacggaattaaattcattgacgaattaaagaagaaagagtgataacaatttatacaagcaaaggaattaaacataaagtccaatcagtaatcaagacacatggtacaaataatgtctatgaaatttgtgacatccaaaaaatttatatactcaaaaatgatcttggacaagcaaacggtttactacaacatgacaaagccacagatcaatatttaattcatatcaacgagaacctccaacatcaacaatttgtaattgcccatgaattagggcattactttctccataaaagattgaacacttttaaagttgtgaattgctctaaagttctaaaagagaaacttgagcatcaagcaagcctatttgcatcagaattaatactgacagataaaatgcttaatgaagcccttccatatatacagggttttagcaaagaacaaatagcagcatacttcaacgtaccatcatttgttactgattataaactttctcaaattggctcatttagtaacagaatctattcacacgaaataagcgcttttggttaaaggagaaataaaatgtctgtaaaaaaacttgaaaatggtcaatatcaagttgacgttagctttggatttgacccgattactggagaaagaattaggacgagaccagtagcatcaaccagaaaagaggctttagaattagaagcaaaattaagaagagaatttcaagaagaaagagcaagaaagtccagatcagtaagctttccgactctaatttcaatttatttagcaagttgtgaaatagatagtaaaccaaactattatcagaatcagaaatacattataaacaaacatatatctgattactttttgaaatctgatatacaaaaaatcacacatagagaaataactgatttcagaaaacatttaatggaaacaggtctaagcaataaatcggttaataatataatgactagtctaagcaaaatttttgatacagctgtacatgaagaaatcttaaaaagaaatccgtgtgacaacgttaaacgattacctttaacaagaaagaaaatgaagttttggagaccagaagaattcaaaaaatttattagtttaattcctcaagatcaattattgtttaaaaccttttatactgttgcttttctaactggactaagatgtggtgaaatgctcgccctgcaatggaaagatattgacaaaatcttattagaaatagatgtgcataaatcgtgcacctggcttgatggtcaatttgttgttactactccaaaaaccaaaaattcgattcggcgagttagcatcaataaaaaattgcttaagctactagaacgttggaaagaagcacaagaagagttgtttaatgaattaggtattagacattcacatgatacctatatctttcaatataaagatacaccttcaagaaaagatattttcagtcggaagattaaatacttttgcaaggatagcgatcttactcctatacgtttacatgattttagacactcacacgttgcactattaatacaccaaggagaagattacataacaattaaagagcgtttaggacatggttctgtaaaaacaacaattgatgtttatggacacctatatccaaacaagcaaaaggaaatggctgataaattagatgacttactttaggtaagtgggcagtttgtgggcagtaaatcatttgaaaataaacacaaaaaaataccaagggcgtcaaaacccttggtatcattgatgcggccgagaggacttgaacctccacgggttattcacccactaggccctcaacctagcgcgtctgccattccgccacgaccgcgtaatgatgaaattgtgtttgtgctggtttattaggctcttaacctagtaaaaccaatttgcgtacactttgtaaataaagtgcgggtgaagggactcgaacccccacgtcgtaagacactagatcctaagtctagcgcgtctgccaattccgccacacccgcaaaaagacaaatggtgagccatgaaggactcgaaccttcgaccctctgattaaaagtcagatgctctaccaactgagctaatggctcttactattcaatttaacaaaaataaaaatggctgggctagctggattcgaaccaacgcatgacggagtcaaagtccgttgccttaccgcttggctatagcccaacgaaatggaatgacccgtacgggattcgaacccgtgttaccgccgtgaaagggcggtgtcttaaccgcttgaccaacgggccgatggttgagaacttatatcgaaatcttatggcggagaaggagggatttgaaccctcgcgccgcttacgcgacctacacccttagcaggggcgcctcttcagccacttgagtacttctccaatatggctccacaggcaggattcgaacctgcgaccgatcggttaacagccgatagctctaccactgagctactgtggaataatgagacaagacttattatatcagccttgatttacagtgtcaagaggtaaatgtttttatttatctctcgtaacgacttttataatgtaacataggcttgccatattcgtcaaccttttttacgaaaaaattctttttatttttccgcggcattttccgcacctgtatctgtcagggttcatggcgcgcttctttatatactgttggccgcaggccgtacagatatacatataagtttttttgttttccgcttttttcttaaggggtgtacagaacctcggcgcgttgacttgctgcaaaagcattctaaaatctctgtctctgtgcttgtacccttttccttcaaggtgaagatgataatggcagagctcgtgcttgatgatgccgatcagttcctccctgccgtgttcaatcagatattttctgttcaattcaatgttatgagaggttaacaggtaccttccgcccgtggttttaagcctgtcattaaaaagcgcctgatggcggaacggctttttaaaatatgttttagaaatatcctctgtcagcttttgaagctctatattatccatagtgcacctcacttaaaaaacattgaacgggacaattcaccgttcgcatacaatatggtaatcaccgtccctcttatgataaaagctgaggaggaatgagcctatgccaaattggcttaaaaagcagatgcaaaaagcgttccttgaaaaagataattaccaaattaaactgctgaatcaatgctggtatttctataggaaaaaacactgctcgtaagcagtgcttttattttaccatagacagcgatactctgcctttttgtacatctacgccgtcaacccaaactgtcacaatatcgccgacagatacgacatcaagaggatgcttgacgaattgattgctcaattttgagatatgcacaagcccgtcttgtttgactccgatatcaacaaacgctccgaagtccactacattgcgcacggtgccctgcagttccattccctctttcaaatcttccagctgaaggacgtctgttttcagcaaaggcttaggcacctcatcgcgcggatcgcgttccggccttgtcagctgttcacaaatgtctttcagagtgatttcgccgattcccagctcttttgccgtttcagagagcgccagctgattgattttgtccttcaattccgccgtgccgatatgttctgttgaaagtccgagttttttcaaaagtgcttttgtttctttatagctttccgggtggatgcctgttctatccaaaggctctgtcccttcctgcactcttaagaaaccgatacattgctcgtaggttttcgcacctaaccttgggatgtccttcagttcttttcgatttgaaaactttccgatttcctcacgttttttgacaacgttgcctgctacagacttcgataatcccgctacatactgaagcagcgcggcggaggctgtgttgacgtttactcccacctggtttacgaccgtttcgacgacaaaccgcagagattcatttaagcgtttttggctgacgtcatgctgatactgtccgacaccaacagacttcggatcgattttaacgagctccgcaagcgggtcttgaagtcttcgcgcaatagacacggcactgcgctcttcaaccttaaggtcagggaattcttctcgggccagctctgaagccgaatagacgcttgcacccgcttcattgacgatcacataataaattttgcgcggcatgtctttcagtacattgacgatgaattgttctgtttctctggatgctgtgccgtttccgatcgccaccatctcgacttgatactgctcaagaatctttttcactttttcatgggcttcttttgttttgttgactggcgcatgcggatagatcacatcaattttcaagacttttccagtctcatctgacacagcgagcttacagccggttcgaaaggctgggtcaacaccgagaacggttttgcctttcatcggcggctgcaaaagaagctttctcaagttctctgagaaaatatgaatcgcctgttcatcagctttttctgagagctctttcctgatttcacgctcgattgccggctggatcagccttttatagctgtcttcaattgtctcctgcaaaatctctcttacggatgttgagcgatttttgatgacttgtttttctaaatacgccttaatgtgatccgcaggcggttcgatcgctacctttaaaatgtcttctttttcgccgcggttcattgccagcaccctatgcggaacaacttttgcaattggctcttcatactcgtaatacatttcatacacatttttctcatcggtgtctgccgactttccggctgcggacttaatagttcctcttttgaaagtttcctggcgaatccactttctgaaggtcggctcgtctgagatttgttccgcaataatgtgcttggcgccttcaatcgcttcttctcgtgtgaacacttctttttcttcgctgatgtattggtctgcagttgctgccagacgatcatcttggggaagtgtcaggatatagtcggcaagcggctcaaggcctttgcttttggcgactgtcgcctttgttttacgtttttgtttataagggcggtaaaggtcttccacttcctgaagcttcaccgattgctcgattttacgttttagatcatctgtcagtttatcctgctctgcgatcagcctgatgacttcttcttttcgctgattcaggttttgtatgtattgccagcgttcagaaatcgtctgaatctgaacctcatccattgaacccgtctgctcttttcgataccgggcaataaacgggactgtattgccgtcctcaagcaggcggatgacactttcaacgtgtttttgtgataaacctatttctttcgcaatttgctgttttaaaagggctgacgtttccatgtaaccaaagcctccaattttgtcgttctttctctagtgtatcaaaaaccgaaaaaaacacataaaaaaaagaagccggtatttcagcttcttcttgttcttattctcttaggacagctgtccgagaatataggtcaagtcatcttttctcgatgtcgtatacattttcagcgaattcgatatttcttctaccgattggccttttttcaaatgggagcggatatcaggtacgttgagtccatctgtatgtataatgaactttgaacccttttcataggtggcggtgtgcgttttgtatttttgcggcttgcctgataaatagcccgaaatcggcagaggataaaagctttcaccagacggggaatgcagaataaaccgtacatttccgacagagcagtacgtaaactgcctttgctcaaaattgattttcaggatagatgctgtagcgcctcttttgtttttcatcgcctgattacagcgttcgataatgctttctacgtcttcactcgcatagttttccactaagtctttgatggctgcagaggattcgttagcaagtgatccacttcccagtccgtcagcaaccgcgcaaattaactccttatcatcagctttcataaaaaagctgtcaccgcaaatcgatttcccttctttattcagttgatatactagagtttgaatatgctcgttttcttcaacctggatcattacattaactccatcgagggatcttcaatcaaggcctctctgagcttcttcacagctttgcgttgcaagcgcgagacgtgcatttgagatataccgagaatgtccccagtttctttttggcttttgttttgtatatacgtaaggtctatgatttgtttttcacggtctgaaaggacatgaagcacgctttgcagcatcaattgctggttaacccgctcatatccgtcctcctgtgatccgacgatatcaagaatcgtgacggtgcttccgtccgaatccgcttcaatgctgtggtcaacggataaggcttgatagcttttgcccatttccatcgtttcaagaacctcttcttcagaaacatcgaggaattcggcaatctcttcgactttcggcgatctttgtgtttcagtggtcagctgatcaaccgccattttgattcttggacccagttctttaattcgtctcggcacatgaacgctccatgttttatctctgaggaaacgtttaatttcaccgatgattgtcgggattgcaaaagcttcaaacgatttgccgacaacaggatcgtatcgcttaatcgcgcctagcagcccgatcatgccgacctggcggagatcctcgtggaagcttttgccttttgagtattttttcgcaagcatgtcaaccagatttgtgtacacccgcacaagcgtttcctgcgcttgttcatcttgctttgtttggtaatcgcttatgagccgatcgacttcatctttagttagtttcgtagtttttgatggttgtgtcatgatcaactcgctccccatttaaatactttgtcatcgctacggtgacgccggagtggttttgcactctgacttcatccatgagcgtttccattaaatatagaccgagccctccttctgataattgatcaactgtgtgcgaaggtgtgtacggccctagatcctgctgcttttgatcaaagtcaaagctgtctccttcatccgccacaataacctctaaacggtcttcaaacacaccgaatcgtattgacacttccccatttttatcttctttgtaagcgtgctgaaccgcatttgtgcacgcctcactgactgcgattttcaagtcttcaatttcatcgtacgtatagcccattctgcttgcgacccctgacagcgtcagtcttataattcccacatattcaggttgggccggcactttcatttcgatgtaatcagcattattcttcattgcactccaccttctgactttgcagaaatatcaatgatgtccttcaagcctgtaatgtcaaacagtcggatcagccgttcagaaagattttcaagtttcagcgaaccaccttgttttttcaccattttaaaggtccctacaaaaacgcccaatccggtactgtccatgtagctgacatctttcaggcaaattcttaagtcagctccttgttctgccagaggaacgagcttctctctaagcaccggggctgagtatacatcaatttctcctgcaatgtttacttgtatatcattctcgttttgcttcacatcaacatttatattcattcgtatcacctcaaattttccttcaaatcactagttgctttataccctcgtctgacagacgttaaacctttctccgcaaaacaattaacgtaaaatcatcgtgaagctgaaaatcctgcaatttgaggaggctgtcataaatgtttttgaccatttcctgcgcggaggaacacatatgttcctcaatgagcttctgcagatcaggacgctccaagaaaccgttttccgttctgcattctgtgacgccgtcagaaaataaaacaatcatatcgcccttttccagatgctgatcgaattgtttgtagtcatagtcctgtgagatgccgagaacgagtcctttggcctctaaatcgtaaaacgtgttgtctttttgagaataatagaatcccggttcatgtcccgctgaagcatatgtaaattgatgcttgtccatattgtaattcgcataaaacatcgtaataaacatactggcatcaacgttttgttcaacaacacgattcaaatttttcagcacttgagaagggtgtatgcctgtttccggcaaagagtccattgcgtatttaatcatggacatgcataaagccgctggaatgccttttccgatcacgtccgcgattgcgatattgatggattccttgtctttgacaaagtggtagtaatcaccgctcatctgtttagcgggaacactgatggcgccgatatccagcgcttcctcctgaggaactttagttccgagaagcgtctgctggacatttgccgcgatttcaatttctgatttgatttcctgctgtatccctctaagggtttgatgctcctgataagccattccatagccaatcatgacttcaattaaaaaatccagcgaatgaaacacatcttccgggagacttggatacagctccttcagcacttttctgtgaacgctgatgatttcttccggaggaatttggtgctcgattgtttttcggctgaatttttgggcttgatataaagatgtttctgttaattcggctatatatcgactaagcagctgatgataccgctgctcaataacctccctaaaatccacgttcttacctcctaccgaagccatttgatggcttgtatctctgttccttcccccgctacggaatttaagctgaattcatccatcagccttttgaccccgggaagtcccgcaccaagtcctccagacgttgaaaacccgtcttccatgacttttcggatatcaggaattcccggcccttggtcttccgctataattttcaggcctttttttcctctgtctgcgacctgttcaattccaatctgccctttgccggcatataaataaatattcctggctaattctgaaatagccgttgtaattctagcctggtctaccgtgccgaaacccagttctttcgcaacgtttcgtcccaactgtctggcggccacaatatcccattctgtcatgattcttacacaggattggtcgttcattcgctattcccccaattcccgcttcaatgtctcaagcccctgctctaagtcgagcgcagtttcgatttcctcaagtgcgattccaagttcaatcagcgtcactgccacagcaggctgaatgccggtcaagacgactttagcccccattaacttagacattgtaatgacgtcgcccagcactttcgcgataaatgaatcaatcatatccacagatgtcaggtcaatgacgactccgttagcacctgtttcgtatattttatttaataagtcttcttgaaaggttaatgctgtttggtcatcaagttcccactgaatggacactaataagcaattatacagtttcaagatcgggattttcggatgtctcaaaatgttattcccccaatgaaacgatttttcgatccgtcatttccaatgctgtttgaattcctttttgcagggtattcttagttataacttgggataaatcaatccccaaattgacgatggtttgagcaatttccgggcggattccggccagcaggcattttgctccgacaagccttacagcttctgatgcctgaataatatgatgggcaaccatcgtatcgacgacagggacacctgtaatgtcaatcagcacgacttgggaacggtgtttgacgacgccattaagaaggttttccataattcgtttcgcgcgttcggtatcaattgttccgacaagaggcatcacagtgatattttcaaacaccgggataagcggcgcagacagctcttgcagcgcgattttttgcagagatactgttttttcccatgagattgagtattgattaaaaatttctgtgttaatcgggctgaaaaagcggtcaatctgccagattaattccgtgctctcttgatctggcaatctcttatcattcattttcgtgtagagacgcttccagaattcagcaaacgcagtagccaaaaacttcatagacagtccgatttggaccgctcgaagcgccagttcgctgatttggctttcagcagcattttcgtccttaacagacagcaacagaatgtcgatatattctttagatatattttcatacacttggtcagtcagctgataggattcttgctcgcttaattcttttagtgtgtcagtccacagttggagcagttcattttgattttcggcaatgaactggtatacagtctggttcgacatcaaattcgcttacctcccaataaaaaacaacatattttttcgttatttcactattatatcgtttatgttttttgaaaacaaaaaaagttgctctatttgagcaacctgcaaatatgtctaaaaatcaatgagtgccaaactgatttgtaaggcttcatcaaccttatccatcatttcatcatccagatgagtaatcttatccgttaacctttgcttgtcaatcgtccgaatttgctccagcaaaataacggaatctctttcaaaaccgtagcgttttgcatcgatttcgacgtgggttggtaatttcgctttctgtatttgtgctgttatggctgcaacaatagcagttgggctgaagcgatttccgatgtcattttggatcactaaaaccgggcgcaccccgccttgctctgagccaacaacaggagataaatcagcaaaataaacatcgccgcgtttcacaatcaaatgattatcctccgctgactaagcgctcaactgtcgtttcagcctcgcactccgcaaagtgagcctcagaagaaatattcaggttgattttcgccatttccatatagccgcgtctcatcaaatcacggttgtgacgagttgttcgttcgctgacatacgctctcactgcttgtgatatcagttcgtttctgcttcgtttctcccgcatcgctacaccatccaattcagctactaggttttcgggcaagctgattttcatttcggttcttgcgctggattcagacaaaaaacatacacctccaccaaacttacggatacgactcttttatccatccagtgataatgataccattattcactcttcaagcaaagctgttttatgaattctccatttaggtaagttaattgcttgtatttacctgcaataaaggatttcttacttccattatactcccattttccaaaaacatacggggaacacgggaacttattgtacaggccacctcatagttaatggtttcaagccttcctgcaatctcatccatggaaatatattcatccccctgccggcctattaatgtgacttttgtgcccggcggatattcctgatccagctccaccataaattggtccatgcaaattcggccggcaattttcaggcgttttcccttcacaaggatgtcggtccctttcaattttcggagccagccgtccgcatagcctacaggcaccgtcccgatccatgtatctttttctgctgtgtactcggctccgtagctgacgctctcgccttttctgatcagtttgacatgtgacagcgtcgaatgcagggtaaatgccggacgcagctgaaacggtatctcgtccgaaatgtcagcagacgggcgaaggccatacatgccgatgccgaatctgactgcattaaaaaagccttttttcagccggagaccggcggcgctgttcgcgcagtggaccatcagattctttaacggcagcggagcaatcagctctttaaagcgctcaaactgcattaagaaatagcctctttctttttcatccgctgtcgcaaaatgggtaaatacccctttgcactttaaacgagggttgcggtcaagaatggccatcacgttctgaacttcttcctctgtttttacaccaagcctgttcatccccgtatcgaccttcagatgaaaatgaagagaaccttttttcgtgtggcgggctgcctcctgaagccactcaacagaataacctgttaaggtcacgtcatactcagcagcgattgccacatactctgggggaaccgcgccaagcaccaatataggcgccttcaatccctttttgcgcagtgaaatcgcttcatccaaaatggccacggccaggcatgaagcacctgcgtcaagagcagcctttgctgtttctgcatcaccatgcccgtaggcgtttgctttcacaactgccatcaggtggacatgttcaccgatatgttttttcatattgctgacattttcctttattgcggacaagtcaatttccgcccacgtatctctgtaaaaaggttttgtgctcattacgacacttcctagcttttattcaatatcatttacatatcatactaaaattaaaggctaaagggaaacgatgtctaacgaaaaaaaggccaaatcatgtttggcctttggcggttatttcgatgattgtccctgcatgcttttcgctactttcaccatttcctctttagaaagatctttagaagagagaaggtaatctacaccttcatatgtccatgacaatgatgcatccgacaaggcgccgatggtgtagccgagatttaccggttcgccgttcagcgtaacggaggaggaagccttggcaatctgggctttttcctgaattaacgtaaatgatttttctcctccgtacgtcatgatgatgcgcttcccgtcttcagtagatatatctttttcttcaagcagcttgacgccaagcggcagttccagcggcgttttgaccgcaaatgtatcggaaggcttcgcgcttgtggcaacatccatttgagaaagggtcatatttttcttttcgtcaaatgattctttatcaaattgtttattaaattcaaagctgctgaattctactttgaccatcactttccggtcagtatccatcactttgacagatgacgggctcatatcttttttgttaaatgtgatttcttgcgtgggcagcattttgttatgctgataatttgtttttgtttcgaatacgtatttcttttctttcgctgtgaaaactgcatccgaatcgttttgaacatcctttacgagcgattcaaacagataaacctggctgctgttgttcggccaatcgctttgaaatctgaagctcttatttaaagacggcgtgagaacgaatactccgttttcatttcgtaaaatgacttggttttggtcctttttcggattttctaaataaaccctgtacagagacggctttttgtgccagatttccacattgtatacttgaggctcactccctgtctcgatggtcattttcgcttttgctttgtacgaggtgtattctttcgccttttcatctaacccggccacaatatcttgctgtgttttttgcccgcaggcagaaagaataagaacagcaagcagtcccgttaaaagcaaaacaaagctttttctcacctttttcaacccctttttctcaattgatgtaaaaggaagaaatcgcttgtttgactttaacggtacgctcggtacacgtttaggcagaacagatgcgtaccataaaagcctcaaacaacttgtctcccttaatgcactatcaaatatatgagtggggtttccctaatatgcagactagcttgacaacctttcaatcacaacctgcgcggcagcgtattcttttgtatgagtgatcgatacgtgaacggcggcttggctcagtttcgtgcaaatgatatagggcttgccattttggtctttcctaatttcaatgtcctgaaagctgagctgcctcccaatgccggtgccaaatgctttcgagaaagcttcttttgccgcgaatctgcccgcgagaaattcgatttttcttttctctgaaagctcatagtattggtcaagctcgcttcgcgtcaaaatccgctcggcaaaccttttctggcgcccagccatagaggcgatgcgtttaagctcggtaatgtccagcccaatgccgtaaatcatgtatgataacctcctttgcctacgtactatttaaatggtttgtctcataaacgtgttactatagatataccaaaatgaagaaaaggggctcggaatgtttatacggactgaaaattttcaaacgtttatcaggctttaccccgttgtcacctttatattggctttgcaagctgttctctggctgtttttttcacttcctgcccattcagtcgtgttatggagggataccgtcacaggctataatctaggtgtcgcaaacggtgaatggtggcggctgatcacaccgattttgctgcacgccggtttcacacatctgctgtttaattccatgtccatctttttatttgccccggctttggaacgcatgctgggaaaagcgcgttttcttcttgtatacgccggctccggcatcatcggcaatatcggcacttatgttacagagccgcttgattacgtgcatgtcggtgcttcaggcgcaattttcgggctattcggcgtgtacctgtttatggttctttttcgcaatgaactaatagggcaggagcattccaaaatgatcatcacactgctcgcatttgccgttctcatgtcgtttatcaactccaatattaacatgatggcccatctgtttggactatgcggcgggcttcttctttcgtttttattcgtgcaaaaaaaagagcggcggtattaaccgtcgcttcagattgttgacaaaatcctaaaatggttttcattttaggattttgtcatcttttcagcgtgattgaaaacccttgaagtctaggaaggacgagcataggagcggagcgaatgttctaattcgtgagcaccgaagcgcagtcctgacaacgaatgcgagggtttgtcgacacgctggagcggcggtattaaccgtccgctttttcatatgagtaccactttaaaatgaaggctgcatcctcttcacctacatccctcaccgttaattcttccatatggctcgatgatttcaccgaagtagaaatggtatacaagcggcctttcttttggaaataggattggctgaacttgcagacctgcattcgttttttcagtacaatggcggttgttctgcctataaatctagacgtcagctgaagacggtccccgttgatcgtccatgcagcctctttatacgcgagatagccgaagagcaattctatcggcagcaggatcactgacagatagccccatggctgaaagaagatacataacgggatgatcaaaaagagtgaaaaaatgacagaacggaacaaatagcgtttcaacgcgcgccgcggcaggcggcggcagttttcttccagcgtgtattccggcgtaaatgttcggagcatgtgcggaagcttttttttatgaatcattggaaagagaatggtcaaagcgccttcttctttttcccggtcgccgcctcctgcgctgacgatggacaccgttacaaagccgaaaagctggcgaatgatattttctttgattttaatggcttgtatttttcgcagcggaatcgtgacttgatgtttttcaataattccccttgaaatcaccagttcctgctctttttttatgatttgaaagttcgcgtatctaaacatcatgcccgcgatgctgaaaatccaggcgataaataaaccgataaaaatgagtaccgcataaataccgatgctggcgtgctgaaggaaggaaaatttatcgaataaccaatccatcggcagcacttcatcaagctgggaaataagtgcaaatacagcggagataatgactccgattccgccggaggtagaagcggccatgagcaattctttcgcgttcatgcgatagtgctcttgcacctcaacggacggatccaactcctcttcagcttcaagccgttcttcatcaagttcattttctcgtctttgcgcttttttcttaaagacagcttctttgatgcgttccgcttcttcaacagaaatagcagaaagaacggcttctgcctccttgcctccgcctgctgtttcaatttgcagcttcacaagcttaaagatttgctggacaaggcccgcgctcgtattcattgtttgaatccgatcaatcgatatgtatcgctttttcgtaacaaataagccttcttcaattctaaattcatcatcttcaattcgataggtaaaccttctccatttgataatgcttgccgctacaagccagatgaacagcacaccgagcgcaatggctccgtaaaaacggacagtatggtttgaattgacaatatacacaaaaaagaatggcagaatgatattttttatcgtttgaataatggtatggcataaattcaaaatgactgccgccgggtgcaggcgtttcggttcagacatcatcgtcagtcaccctcgccagacgggaaatggagtctctcagccgatccgcttcctccatctctaaagcggggatcgaatgaacggtcgcggccgtggaaattttcaccgttgccaggttgtatttttttaataatggcccttgtgacgtatcgacgtgctgaactctgaccatcggaacaatcacacgtgtcaccacaaaaatacctgactgaatatctatttcatgttcatggacttcatatcgccacaccttatgacggaccttcggaatgataaagaccgtcacaatcgatcccagcagccaaactgcgccgagcacgccgctgatccagtacggccaatgaaaataatagcttaacactgcaactgcaatgacaataagcaagcaaacagcggatatgatgatctcttgaagtcgccaaacctttaatccgtctggactgatttggttttttggctgctctctcaaaaatacctacctccctttttttcgtcgttatttatacgtctcttttacagaaaggtttcattcttaagcatacagagaaaaatggcttccgtcagctgaaagtttgctgaataacaaatcgcgaacataaaaaagcccaaaacatcatgttttgggctctgaatcgatcaaattagtaagattttttctggcgtctgtcacctgaagaacggcgatcgtttgaacgctttttgtcataggaagaacggttgttgcttttcccttttccgccgcggtagccgccgccttgaccgtctctgcgtttagaagagcgctggttcttgtagcgtttgctgaccatcggcgcttcgtctgttaagcgaaccggtgtgtcgtctggctcttttgtagccattttgatagccgccgcaaccactgttactgcatcatgatcttcaagcagctcagctgccgctgtcatgtagaagttcaggttgttttcactgattgtcgtgcgaagacgttcaacagtaacctgctgctggccttctaacgcttcatcaagtgtaggctccttcatgcggtccattttgcgttttgttgtttgttcaattgcgcgaagcatgcttttctcacgcggtgtaatgaacgtcatcgccatacctgtttttcctgcacggcccgttcttccgatacggtgaacgtagctttcaggatcttgaggcacgtcgaagttgtatacgtgtgtaacacctgagatatcaagtccgcgagcggcaacatcagttgcgactagaacttcgattgcgccttctttaaatttacgaagcgcaaccatacgtttcgcctgcgttaagtcaccgtgaataccttcagctgcatatccgcgaaggttcagggcttcagccagctcatcgacacggcgttttgtacgtccgaatacgatcgcaagctcaggagactgaatgtcaagaaggcgagtcagtgtatcgaattttttgcgttcttgcacttccaaatagaactgctgaatgttagaaaccgtcatttctttcgcttttacttttacgtgttccggctcagtcataaagcgctctgcaatgcgtttgatcggcgcaggcattgtggcagagaacagaagtgtctgatgctcgcttggcacgtttgaaaggatagattcaatatcatcaatgaatcccatgttcagcatttcatccgcttcatccattacaacagtattaacattgtttaaacgaatggtgcggcgattgatgtggtcaagaagacgtccaggtgttccgacaataatattcggattcttctttaacgcccggatttgccgtccaatatcctgtccgccgtaaataggaagaaccttcgcacgtttatcttgtccgattttatacaattcttcagatacttgaatggctaattcacgggttggcgcgattacgattgcttgaatattaggagactcggggttaattttttcaacaaggggtataccaaacgcagctgttttacctgtacctgtttgcgcttgtccaatgacgtctttatttgaaagtccgagcggtatcgtttgtgcctgaatcggtgttgcttcttcaaatcccatacgattaattgctttcatgagatcagaacttaaattaaaatcttgaaacgttatagtcaaattattcaaactccttctaattgctgtttcagtaatgtcgtgatttaccacttataaaactgccctttagacaagaaggacaggatccatccgtatacaaagcccgaattactttaagttttatcttaccattacactatttgtttttcaataagatgagaagcagatcggcatctcgaatatgccggctgctgctccatccgctcccaagaatccagcggagaacttcgggtcacgatgaaaagtccggacgaatatgttcgtatcgcgaaataacctatatatattgtatcatagccgcagccggccagatatacataattttcggccggcatacattagtgtttgcacatcatgttattttatgatgcaatatgcgttttttcgcaaaatattttcttacgaaagcgggctctctattaaatctttaacgatttcttcaagcttcatacctctggacgctttgaataaaatcaaatcgccttttaatgcgttttccttcacagcttggaggagatcttttttctcagtgtaatggctgacgcggtctttctcaaagtgtttcagggcgccttccgcgataaaagctcccagttttccgtacgtaaagacgcggtcaattttatcagggctgatcacagcgccgcactctttatggaacgtttcttcaagatcgccgagttcaagcatatcaccgagcacgagcatttttttgccgtagccttcgaggctttctgtcaattgaattgcagctttcatggaagtcgggctcgcattataagcgtcattgattatcgaaaggccgctgtctgttttgatgagttcaagtctcatcccggttacctttaggccgctcagtccttttgccgcaccctcaggcgtgatgccaaaataagctcctgcagcaatcgctgccatggcgttcatcacattgtgcttgccgagtattggaataaaaaacgtgttttttatccctttgattgtaaaatgggttccttcctcactctggctgacatcctgaagctgataatcattatgcgctcccgtaccgtacgttttcgtctggcagctgtatgcattttgaagaagcggttcgtccccgatataaatcagcactccgtcttctttaagcccgttaatgatttcaagcttcgcctccgcgatgccctctctagagccaaggtcttgcatatgcgattcgccgatattcgtaatcactgccgcatccgggtttgccagtcggctcaagaggtcaatttctcctttggcgctcattcccatctccaatacggcgatctccgtattttcaggcatcgctaaaaccgtcagcggcaaaccgatatgattattgaagtttcctcctgttttgtgaacacggtacttggtccccagtacggcgtgaatcatatcttttgttgtcgttttgccattgcttccggttactccgatgacacgtgtgccaagctcctgcaaataggcttttgcaagctgctgaagtgcggtaagggtatcgtccactaaaatgacggcgtgattctcgggcggatttggttctgaccgatcccaaagaacagccgctacaccagcttcaaaagcctgctccacaaaagtgtggccgtcaaaacgttcccctttcagcggaatgaagagctgatgttgttccagttttcttgtatcggttgccactccatgaatgactgtttgttcatattgcggatttgttagtgtgccattaaccatttcggcaatgttttttactgttcgcttaatcaagtaaggtccctctctttcttttgtatatacgggaaaaaacactgcccttttaccggcagtgtccttcttcattagaatgtatgcttaatcaattgtttttcagcgtggcgttcttttgcaagctccacaagctgttcaatcaggtcagcatattccactccggcttctttccagagcagcgggaacatgctgaaaggtgtaaagccaggcattgtgttgacttcattgatcagaacttcgccgtcagctgtcaggaaaaagtccgctctgacgagtcctgaaccgtcgatcgctttaaatgctttgatcgccatatcactgattgttgcgtattcctcatcagtcacaatcgccggaatcatcagatcagtatctccatcctcatatttcgctttgtaatcgtagaaatccgtcttcggtgcgatttcccccacaacagagcatttaggatcgtcatttccaagaacgccgatttcgatctcgcggccgttaatgccttcttcgacgacgactttgcggtcatattggaaagcaagctcaaacgctttttgcagttcttcacggtttcggcatttgctgattccgacacttgagccgaggttagccggctttacgaagcaagggtagcctaattcctgttcaacctgctcgcagctttctttcggagaacgagtccagtctttcttaaggaaagctgcgtatttagcctgagcaaggccagcctgcgcaaataaatgtttcatgacaactttatccatgccagctgaggaagcaagcactccgttgccgacataaggaatgttcaacagctcgagcattccctgaatcgtaccgtcttctccgttcggtccgtggaggagcgggaatacgacgtcgatggcttcattttgctgtgacgcttcctgcggaaacatctcctggttcaaggcagctggagaaaaagcactgcctccttgctcaaattgaagcattttcacatttgaaacaggctcagttaaacgggcgcctcttacccattcgcctttttctgttatataaatcggatgtatatcaaacttctcagtatttagcgctttgattacagccagagccgtctgcagggaaacattatgttctgccgactttcctccgtacactaatcctagacttgttttcaatggatactccccccactacaattcatctttactatcttatcattttcaccggaaaatgatctaattatttttgggcatgctgatgttgaatgcatttgtatgtaattcctttttattttatattaaaatggcattgaaaaggagatgtgacatatgaaaaaaatcacaacaaacgaacaatttaatgaactgattcaatccgataaagaaatcattgtaaagttttatgctgattggtgcccagactgcacacgcatgaatatgttcatcggcgatattttggaagaatacaatcaaaacgattggtatgagctgaataaggacgagcttcctgacctggctgaaaaataccaagtaatgggcattcccagcctgcttattttcaagaacggtgaaaaaacagctcaccttcacagcgccaatgccaaaacgcttgaagaagtgactgaatttttatctgaacatataagctaattcgttaaacagccttattttatgtcgtcaggctctacatgaacatgaacatgagtgacatcgtgttcatgttttattttgtcttctacttcatccgccactccatggccttcttctactgtaagcttcggatcaaccgcaatgaccatctcgatatgaactgtactgcctaaatacctcgctttcacatcctttaggcgatgcacattttcgatcctgccgacggtctgtttgtaaggctcaagatcttttaaatggaagccgtctgttaaggaatgtgaagcgtctttaaagatatcccacgctgttttgcaaatgatgatgccgatgataaaagccgttaccggatcaatccacggcagcttcagctgggacgaaaaaacaccgataaacgcgccggcgcttacaaaagcgtctgacctgctgtcctttgccgctgccatcagggcagagcttttaatggatgctgccagccttttgttatataaatagatgccatacataaacacagcactgcctaacgccgtccatgccgcgataagatttggcgtttccgttgtgccgcccgcaatcgcttttcctccgccgattaacacttcaatgccgactgccatcataataaaagacgcaacaagagacgaaattgtttcagcccgataatggccgtatggatgatcgctgtcagccggtctttgagaaatccgcaatcctatcagcactgctactgacgcaacaatatctgttccattatttaacccgtctgctctcagcgcttcagaatgatatagaatcccgatgactagctttacaacagcaagaatgacatatgcaaaaatattgaggagcgcccctttttctccctttttcagattttctgtccgctccattgaataccagcctccattctattacatagtatggttcaaaacatgaaaaatagcagggtgcgttcaatgaagcggaatatttcgacagcaaattattgcccgggaaactttttgtcgatttgttgaatgtttgtaaattggagaaagaataggactcttttcatctttacaggctattgcggacattgtatactgaagttaattgataatgattatcaatatcgtttgattggaggttggtgacacaatgacacctcagtctgcagaaatcagaaaaaaacagctcattcatctgttaatacagaatggtatatacaaaaagtcaaagcgtcatctgtatgaattgtcgctgacggagttagaaagtgaatacaaacatgtcaggagggcgccggagcatgccgaagcgtaaagtgaaaacttaccaacagctgatccaggaaaacaaagaggcgattatgggcaatccaaagctgatgaacgttatttatgacagaattgaccgcaagcatcaaaaaaatctgcaagagcaaaacaatacataaaaagagccggtaaggctcttttttttatgactcaaacgcttcagctgccagcttgtgtatcacggcgtcatccatcggcgggttgtgaagaccggcgcgcacatcacggtaatagcgctgaagcgggttggttcgtcccaggcttttggccccgacaattctcatcgctttatcaacaacagacagcgcagcgtttgtgacgatatgtttcgccgcaccgagctcgctggtcaagtgtggacgccgctccggatcgtcatacaattgagcgatatggaaaagaaagtgtctggcattgagcagttcaagctccatttcgcctgttctttgctgtacggccgggacattcttgatcggtccattcaagctgtttggagaatactcagatgcaaattgcactgcatagtcacgagcagcttgagccacaccaagataaatcgcaggaatgtgaagcagccagccattcggcttagctccacgaggcccttgaagcagttccaccagcttattctcatcaagcattacttcgttcagtacaaggtcatggctcccagtcgcccgcatcgccatcatatcccacgtctcttcaatcgacaagccgggatcatctttatgaatgagaaacacgcctgttgtttgtttgtcttcaatccatgcggttactaaaaaataatccagagcttgtgacatcgtcgtaaaggtttttctcccgttcactgcccatttgccatcctttttgacggcgtgtgtacccggacgccctcctcttgtcgggcttccggttttcgcttcagtcgccgccctgttaatgacggctccgttttggacttccttggcaacaaatgcaaatacgtcttcatcccagctgttgccttctccaagctccccgatcacgctcaaatgccagccgatgctaagagccgtcgaagcatctccccgtgcaagccgttcttgaaacaggagcatatcgtaaacagaaatgccccctccgccatgagatgccggcaatgttaatgctgtatacccagcatcacgcagtttttgtattttctctgcaggaaaacgtccctgttcgtcatcttcagcagctgtttgctgaaattcatccgcaatccgtccgattttctccatccattgccgctgttgatcgttttgtataaataatgacatccggcagccccccaagttttaattccgataaatttaatatgtattatagatttcctgccatttttccgcaactgttaatctttttgtccagtatagaaaaacacgccgttcccaaagggaacagcgcgattacacaggatttgcatcccggtcttgtttcatgccgagataaatcagcatatatgtcaggtaacccatcgtcatcaccaggccgccaaagaaaaagcttgagaaaatcggctcttcaaaagcggtcactgcggccaacacaatccagctggcatacagatagatgataaaatagcggatgcccgtcttcattttatatatcatgtacagtcccacgagagaaaacaacccaagcgcgagcctgaaataaacaagatgttcaaactgaaacatgaatgacacaaatgagaatccaagcagcaatacgatcggtaaagcggtaataaagttcctcaatcgagacacctccgtcagtacctttagtataaaccaaaatatcaaatgatattgatttacgtgagctttttcacaaaaatgtcattccttgcctttagacccgaacatcccgtttacagaagcaccaccagccaacaacgatgaagaatatggcatgtatgatgagaattccaattgaaaacaatggcgtcatgcctgaaaacaacgctgtctctccgcttctgtattgcgtaaagtcagtgttcgcaaaaagcaaaaagctgccccacttgttttcaaacaacttcatgagctgaacaagtgtactcgctccgtataaaacgacaaaagaaacaacaactgctaccgcgctgttgcggaacagcgaagaacaaagcagcccgaataatcccatcattacagcttcaagccagtttgacccgatcagcgccaaggtgttgaccagcaatgtctttgattccgcagtcaccgatgtgccaaaaaacacgagaccgaataataatgccagaatgtagtatgccagatacaaatagaagctgaccatcacgactgtgattaattttgaccaaaagaccttttggcgtttaaccggacgaatgagcaaaaatttgatcgtctttttatcaaattccatcgaaacaattgttgctgcaattacgatcgttaaagcctgcagcaaaatgttcaggctcggtgtatacgataaatagccgatgaagttttcatctgttccggcactgatgacaatccgtttaatgatcaatgccatgaagaattgaaagacagccatcaggataagagaaaccaaagtgaccttccgattaaaaagtttcatatgttcattccaaattaatttagacaagctcttctccctcctcttgatgagctgttgtcgcttttataaattcgtcttccagtgactgcgtgtaaggcgtaatggaaaacacattcagatcttgtccgacaagtgatcggttcagctccggtatgttttcttttgccacctcaactacaattgtcccgtcttggctctcagcttgatattgattgcctgtcagccaattgagcgctttttcttgcggctgcacttctataatcgctttttctgtggtttgatcagttccttgtaagctgacttccgctttgatctcacctttttgaatgatgatgacacggtcgcacaagtcttcaacctcgcgcaataaatgagtggcgaacaggacagctgttccttccatttctgcgagctctttaatatgatcgcgaaaatccttcatccccgcaggatcgaggccgtttgttggttcatctagaataagaagcttcggccggtgaagaattgcctgggcgattcccagacgctggcgcatcccaagggaataggttttcaccttatcatgaatcgctgacgtcagcccgacacgttccaccacttcatcaagccgttcatccgctatttttttgtgcatattcgcaaagtgcttgaggttttcccagcctgtcaggtacggatagaactcagggttctcaacaatcgctccaaccgcttccatcgctttttcaaactctgtatcatgctggaatccgctgattgtcacgcttccgctgttttgtttcagcagcccgacgatgatacggatgagtgttgtttttccggaaccatttggaccgagaaggccgatgatttcaccctccatgacgtccatgctgatctgttttaaaatctgtttagacccaatctttttatcgaggccttcaatatgtaaaatcggctcagccataaagccttcctcctttttcgacaaaaaataaacagtgcctaacattaggcactgtttgtattatagcatttgttgcttccaaatgtttggttaaaccgatgatgagcgtttactccgactgtttgttcttttcagtttctgtaatgatgacaggcattgtcacctgttgtgttcaccactgtgcgaagcaatgccaagctccgattccgagtcttaattccatgccttgaacaggcaggccggcagatcgaggcacactcattattcgattttaaactacattttatcgctattctctcggggtcctttagacctatcttccttgttggtgacatccagaatatcaaggagaaacacaaagatcggaatcccgataattaaaccccaaatgccgaagaagtgttcagagaaaatgagtactgtgaaggtgaaaaaaattggcagctctgttttcgccgacatcagcttcggatttaagaaataggtttcgatcgcatgaatggcgaatatgacaaggacaatgtagagcacatacattccaccgccagtgctgtaggcgataatgctgagcggaatcagggaaatgacgacgcctgctacagggatcaatccaaggaagaacaccataatcgaaagcccaaacagctgcggaaaatgcataatccaaagcgcgataaacgtcagaatacagttgacgagcgcaatgataaattgagcctcgagcaccttgccgaacgttcttgcaaatttgcttccgaaaaaagcaatctcctcataaaagaccctcagtttgctcgttttaaatttcgccatgaattcagaaagccgttttttctcaaataagaaaaacatgctgagaatgagcgccatcacgacctgcaagccgaatgtgctgatatcggccagatacgtatacactacattgaagccctctttgacatatgaactgatgttaatatccccgaagacactggtgatctcatcaaagaaagggatgctgtcaggatgatacgcaatatgtttaatctgctttaccagctgctggatctgcgccgcgacgaccggataaaacacaaagcccccgactgtgagcagcacagccagcaacatgtaaagaaacgtaatgacaacccgctggctcacgcggaagaactggcttacaaactgccgcacgacaagctccaaacgatccattagaaatgtgaaaatgaaggtaagcaatattaagttgatcatgctcttaaatagatataacacaccagttaacacgacaaagatggagaaacgccttactcccgggtgctgaaaaaatttaactaaagcggccatttatacactcctgttaggacaaacgtccttcattcaatatagtatccatttgtaaattatataacaaaaaaatgctgaggtctctgtccttaccttaataattcttaaacaattaaaaaaacggccccatggatgggccgttcttttttcagactgctgttttcatttttttcatgccttcaacagcctctacgcttttttcttcatcaaattcattttcgcttttagcaacaatgatcgtggcgattccgtttccgatcaggttcacaatggctcttccttcactcatgaaacggtcaacccctagcaggagtgcaagaccctccagcggaatgacctgcagcgctgacagcgttgaggcaaggacgataaatccgcttcccgtcacacctgccgctcccttcgatgtcagcatcagaacgaggataatcgtaatttgctggccgatgctgaggtctactccaaacacctgtgccaaaaagacagtcgccattgataaataaatggatgtgccgtcgaggttaaacgaatagcccgtcggaataactagcccgacaacggatttggaacagccgtagcgctccattttatccatcatacgcggaagcaccgattcggaagagcttgtgccaagcacgatcagaagctcatccttaatgaagcgaaggtaattccacaggctgaatccgtaaagcttgcagatgatatttaaagcaacaaatacgaacaggaacatcgtaatataaacagacatcattaagcttgccagcggtttgatggaatcgagcccgaagtgtccgattgtatacgccatcgccccgaatgccccgattggcgcggcacgcataatgtagccgataattttgaaaaaaacgtgagaaaccttgtcgaagaaatcaatgacgcttttccctttttcgcctaatgccgcaagacccactccgaaaagaatagaaaagaataagacctgcaaaatgtccccttttgcgaaggcatcaaccatgttggatggaacaatgtgtgtaacaaattcaatccagtcgattccctgaccgccattttgcgtgtattgtgatacatctcccttttcaagcttgctgtaatcaagacccgcacccggcttcataatattgacgacaaataaaccgataatgagtgcgagggtggtgacaacctcgaaatagataaacgcttttccccctacttttccaaccttcttcatatcgcccatttttgcaatcccgagaacgattgtgaagaaaataattggtgcgatcaccattttaacagcgttgataaatgtatcgccaagcggtttcatttctttgccgacatccggccagaccagcccgacaatgaccccgatgatgaccgcggttatgacctgaactgttaaatttttaaacagtttcatatccttcatccccctgtcctattcgccttttgtgtctttcttactagaatgatagcgttttcataacgtctggggaagtttatgatcataacggacattttggtctttttggtctcaggtttatccttttaacacgtagcggttgaccggccggccgactccgccgtattgaacgtccaatttgatgatcccggttttttctaagtaatcaagatatcgtctggctgtcactctggcgatgccgagcgccttggcgacctcttcagcagaaagggatgcggtttgctgtttcaaaaaagcagtgacttcattcatcgtgaagtgattcaaccctttcggcagatcctgtacggcctgctgcggaatattcaggatcgcatcgagctgttcctgggacagcgtatcattcgcttcgattttttgtttatattgcttgtacttttcgagtgcctgtctcattcgctcaagcttaaacggctttaagatatagtcaaccgccccgttttgcagcatgagtgagatcgtttccttgtcttttgcagcggagacgacaatgacatccacttcaagcttttgctttctgatctcctgcaaggtcttgatgccgtcttttttcggcatgtacacatcgagaatgacgagatctggctgttcttctttaatcagcttcatgccttcctctccgtttcctgccgttgcacagacagtaacgcctttaacagttgtaatgaaatccttattgacctcttgaaccatcggatcgtcttcaatgagcagaaccttccattctttacgagccatgctgtacttcctcccccttcattggaaaaacgatagaaaaagatgtcccctgccccgcatgtgaatcaacttctatcgtgcccgatcctttgtctatgatttgtttcactagatacaggccatagcctgtgccgccagttttattgaccgtaaaacctttgtcgtaaaggcgaggcatatgtgccggatcaattccgcagccgttatcttctattaaaatagcaaggatatcatccgtttgttcgatactaatgtcaattcgtttgtcttcagattgaacggtttcaaatgagccgaaggcattttcaatcagattccccaaaagcacgacaatatcatgctgatcaacatgctcgggaaattgctgaagactgctgttttcatctatatgaacagcaataccgagctctcttccccttctgattttacttaatagaaggcctgccgcagcgtcattttgaatcgagcggtgcagaaattcagtcacattttcctgctcagttgacgcctggaatgcaagctgcaaggctttttcagatttccccagctggatgaggccggcgatcgtgtgcagcttattcatatgctcatggttttggacacggagcgcctccacaaagtttctgacaccagtcaattcctctgccatcttggccgcttccgttctgtcctgaaaaatcgcgacggcgccgatcacttttttcttcatgacgatcggaattctgctgctcatgatgacttttccgctgacacgaatttcttcattataaaccgctttgttccgctccacgatttcgggcaggcgcgaatccttgagaacctcccaaatcaccttgccgatcagatccccctgcacttcaaagatctgtttcgctttttcattgaaaatcgtaatgatgagacgattgtcaatggcgattaccccttcattcatcgagtgaaacgtcgctgtccgttcttcatacattcggacaatctcatggggttcaagctgaaacatttgttttttgatatggcgggccagcaaaaaggaaccagcaaggccgaagccgagtgtcagcacaacgatgaaggcgatatcacgctttaaatgaagcaggatgtcagcgatccccggcagcgtttttccgacaagcaccacgcctatttggttcaggtcttgatccttaaccggataaaaagcgcgaaccgccgtgccgagctcgccctttgcttcagagaaataaatgtgctccgcaaacgctgcctcctcgtctgcaccttctgatttcttgccgatgcttgtgctgacaggatgcgtatatcggatgtgattcatatccatgacgacaatatagtctgcttcattaatcatcctgatttcttcaaccgcatggcgaacagcttctgtttgtttttttcgcgccaaggcttctttcacttctgtcatctctgacaccgtccgggccgtattcatcagccgctttttcagctcccgctcctctgtatgctgaatgttgccgatgagcacaatgccgccgatcaaaaaggagaaaatgacgagtatataggataagatcgtgattttccaacggattgagagcttctttttgttcatcagcttctcctttcaggtctttacgaatgtcattgcccccattatccttaacataggggagggcttttcatgaagagtttgcttgcatgtctcgcactgatgatcgctggaattgcaaccgctttatttattggattccatgatcatacaggcaataaaaagattgtttatgatgacgaacaggaaggcctgcaggatcaaatcgtgtttaaattcagccacgtggttgctgaaaatacgccaaaagggctggccgccaataaattcgctgatttggtgaacgaaaaatcaggcgggaaaataaaaatagaagtatttccgaatggaagcctgtactcggacattgaagaaattgaagcattgcaaaacggcgatgttcaatttatcgccccctccacatcgaagctcggcatgctctcgcctgaatggggagtgctggatctgccgtatgcatttacagattacaacgccgtcaaaaaagggctgaacggaagcatcggcacacagctgtttgattctctaaagaaaaaccaattaaaaggactggcctattggacgaacggctttaagcaaatcacaacaaatcaagggccggtcaaaacaccggatgatttaaaagggcaggatctgcgcattatgcaaagcgatgtgattgaggatcagttcaagctgcttggcgcaacacctcatcaggaatccttcaattctacctttcagctgttagaaaacaatgtagtcgatggcgaagaaaatacaatttcaaacatctattctaaaaaattttataatgttcaggactatttgacaataagcagccacggttacctcggctacgctgtcatgactgatgaacacttctggaaggcgcaaacaccagaaacaagacgcattttgactgaagcgatgaaggagacgacggagtggaatgaaacgtatgccgaacaaatgaacaaggagcagctggaagaaatcaaaaagaattctgctatacatatttatgagctgtcagataaagagaaacaagaatggatgaagcgtcttgaccctgtttaccggcagtatgagcccatcttcgggcgggagctgatccggaaactgttggagctgcgaaaagattcatagttcccatctcgatacgctgtttttcgtttatctttctatcgatcggaaatataaaaagagataaacgaaaaaaggagatgggtacatgtttaagcacacaaaaatgctgcagcatcctgctaaaccagatcgtccagatccattattcgctaaaaaaatgcaagaaattttaggcgggcaattcggagaaatttcagttgccatgcagtacttatttcaaggctggaacacaagaggaaatgaaaaatacaaggacttgctgatggatacggcaaccgaggagctcgggcatgttgaaatgattgcaacaatgattgccagacttcttgaggatgcacctcttgatcagcaggaaaaagctgctgaagatccggtcatcggctccatcctaggcggcatgaaccctcaccatgcgattgtatcaggacttggcgccatgccggaaagcagtacaggcgtaccttggagcggcggttatatcgtagcaagcggaaacctgctggcagacttccgcgccaacctgaatgcggaatctcagggccgtctgcaggtcgcacgcctgtttgaaatgacggatgacaaaggcgtcaaagatatgctcagcttcctgctggcgcgtgacacgatgcaccagaaccaatggcttgccgccattaaagaattagaagcacaggaaggtccggttgtgccgggtacattcccgaaagcgctcgaaaaacaagagttctcacatcagcttatcaatttctctgaaggcgaagaaagcgcccagcaaaactggctgaatgaaaaagcgccggacggagaagcctttgaatatgtgaaagaagcaaaaacgtttggagaaaaaccggagttaaaaccagcaccgccttttgttcataatacacttccgggacgcgagtaaagagacaagcccaaaacatgatgttttgggctttgattatgccttcagaaccgtccagtctggttcgtaccggatatcagggttatgtaacagatcgtgaacgaacggtttatcctcttcgtacaccgtcacctctatcgaaagaattacagccttctgatcgttttcctcgtatatgctgtcatgttcgttctccataaaatgatcataggcttctctgttttcccatacactgatgatttctgcggtgagcggctcgtctatcgtttttcgccagccgccggcctgtttgataaagccgcttatatgcgataatgctccccactgtgactgcgcttttgcaaatgcttcagcgtttgcagcgtctacttcacatatcacctttttgattagcatggctactcctctatgatgacggtttcggcttgtttatgctccacacagagatttaccgttctgacgtaagagcgtgtgcggtgaaccgtgcctttcgggatcagcaggctgtcatttgttttgagcaccgcggtttctttgtccttaaaatcgatcagcagctccccttcaagaacaataaacaattcgtctgagtcagggtgatggtgccagtcatattctcccgtaaacaccgcaaggcgcacgcagtggtcgttgacctctgagattgaaaaattggcgtgcttttctttgacttcatttgcgatggcgagcaagttttgcatcttggacattagcgaaaacccctttttcacttattgtatcgcaatagcggcataaattgagaagattccaaaaaaagcgatccagctgatgtgccggatcgcttttttatttacaggttgtcttcctttatgcttttgattagtcgttgttgcgggcgtttccgccttttgagccaatttcttggtagaattctttatcatgatttttgcttgttgcctctccgccttttcggccgatttcttgatagaattctttgtcatggttttcgctagtggcttctccgcctttttcaccgatttcttgatagaactctttgtcatgattcttgctagtggcttctccgcctttttcgccgatttcctgatagaattctttgtcatggtttttgctagtggcttctccgcctttttgaccaatctcttgatagaattctttgtcatggttcttgcttgttgtttctccgccttttctacctgcttcttctctgctcattttgttattatctgccattttgaattcctcctttaattggtgttggttgttgtattcccgctcacaattcttttaaacaaacaaaagacattgggtatgtttccactaaaaaaagcaggcggatcgcggtgtccgtctgctttctgctattccatctctcgttctgtttctttcagtcgttcaagaatgcgcctctttttgtacagcatcatgcctgtctcggtaatgtcgtttaatgttgagcgattggcagcggcgccaaaaaccattccggcaaccggcaccatctggaaaagttttttccagccaaacgtgtctcgatagcccaaaacgacttctcgccagccttggatttgagaagcgacattcttatatgtacggtcttgatcgtagtgttttaattcctgcaaaatcgatcttttgccgacaacatcagccgacgtcagctgcaggcatttcacaatgaagacgcgttcttttttctcctttgggtcatagccgtatgcgactgcgatatcctgtaatgtttttagtgataagccaagcactgccggaatgtctgccgccagcgtaaacacgccgcccacaccggttgtcgcgccttgaacggttgctgcgttggttctgtttttgcccattccttccgcaatttcatccatgacaggaagaggcgctttccggatgtcctccagcgattcaaagatctcctccggcagtttcttttgaaacatcctgataatctgtttttcagatgtcaggtactgtccgcctgtttgaacaaagctgccgacctcatccaagagcttgccgatctttttctggatgaattccggtgtcagcttgtccagcagctgaaacgggagacggctgagcttttcccaaaaccagactttttgctgatctttttcccatttctctatctcttttaattgctgatgtaagtcttcttttcgttctgttggcacccaacccgcacttcccttccgttttttctactatatagtataccttcattttttcggatgcgtttttatttttcacctgcgggtaccatttttataaaaggaaaaggagtgatagacatgccttggtcgatgaaggattatcctgcttcattaaaaaatcttgagaagccggtgagaaaaaaggcgatagacattgcgaatgcgatgattgatgaaggctatgaggaagagcgcgcgattccaattgcgacaagcaaagcgaaggaatgggcggaaaacgcctctacagatgaaattgatgatttcctgacgcatgatgatgagacagaacgcgatgctgatccaagcagcggcagcggccccgagctcatgaataaagcagagcatgttattaagcataaaaaaggctgggcagtcaaagccgagggcgccaaacgcgtgtctgaaatcaaggatacaaagaaagaagcgattgaacgggcaaaggaaatcgcggcgcataaaggcactgaggtcattgttcatttagctgacggcagtgtgcagagaaagattaaaacaggatcataaaggaatatgcttttaagtgtttcgaaatgatcaggagcggttattgattggtaaatcatttatgagaggtgatcatgatgcttagctttttggtttcattagttgttgctattgttatcggattaattgggagcgccattgtaggaaaccggctgccgggaggaattttcggctctatgattgccgggctgatcggcgcttggatcgggcacggacttcttggcacatggggaccgagcctcgccggctttgctattttcccggccatcatcggggcagccatcttcgtattcttgctgggccttatattccgcgggctgcggaaggaagcctagactcattagatacagaaggcatcgtttcgaactgaaacgatgtctttttatatgggaccttattccgaatccctacatatcatgttacataacagggaaaaattcagaagtgtattttgaacattttcggttgacaagaaaccgggatggtcatatgatgtagataaaataatttgccttaaggaaactctttgttgtacggcaaaaacaaacagaattcaggtgagacatgatgaacaaggacatcacagcacaatctccccgttccaaagccgtccaagatgcgcttgacgggaaaatcagaggattcagagggctgctcccttttctcggccctgcatttatagcagccattgcctatattgatcccggcaacttcgcaacgaatatttcggcgggttctaaatacggatatatgctcttatgggtgatcttattttctaatatcatggcccttttaattcaatccctatccgccaaactcggtattgcgacaggcaaaaatctgcctgaggttgcccgtgaagaattcccgaagcctgtctcgatcggattatggattcagggcgagcttgtcattatcgcaactgatctggcggaatttatcggagcggctctgggactgtatttgctgttcggcgttccgatgcttgaagcgtctattattgcggcgatcggttctttcgcgatattggagcttcagcgccgcggttatcgctcacttgaagccggtattgccggtatgctgtttgtggtcgtgatcgcctttgcgctgcagacctttttcgcaaagcctgatgccgtgtcagtgatgaagggcctttttgtcccggcgtttcatggcaccgacagtgtgcttcttgcagcgggtattcttggcgcaactgttatgccgcacgccatttatttacactctgcccttacacaacggcgggtggttggcaaaactgatgcagaacggaaaaaaatctttaggtttgaatttattgatattttaatagcgatgctgattgcaggggctattaatgcaagtatgctgattgtggctgctgcattattcttcaaaaacggcctgtttgttgaggatcttgacgtcgcatttcagcaattcggacatcttgtcagccctatgtctgcggctttattcgggatcgggctgctcgttgccggtctatccagttcgtctgtcggcacactttcaggcgacgtgattatgcaaggatttatcaactaccgcattccgctgtatgtacggcgttttatcacgatcattccgccgatcttgatcatcgcgtcaggtgttaatccgacgaccgctctcgtactgagccaggtcgtgctgtcattcgggatcgcctttgccctcattccgcttattatgtttacaagcaataaacggatcatgggatctctgatcaacgccaaatgggtcacagtggtgtcttggctgattgctgtattgatcgttgctttgaatgtgtttttaattgtagatacgtttcgataaaaaaaccggcttctaaagccggtttttattattttcgcaaaagctcattgataccctttttgacagaaatttgttatgatagaagaaaaatcggagttttgatgatgtcagtatttattctgttttatttgtggattgttcctattgttatcggcattttatgttctgttgctgcccataaatccaagggaaaaatgagagtcgcgcccggcattgccatgatcgtgctcagtatcatttccttaatcacggcgtttacggccggacacacaaatttccacgtgtttatcggcggcatgtttttattcggcaccttcttggtcggttctgcttttcctttcttcttcgggctgaagaaaaaagagaaataagcttataatgagatgagttctgtaagatttgataagaataaacatacaaggacaaaaataattgactaggtaaaattaagactgccgactcacatcgacagtcttttaactatacaattgtatttatttcgtgttaattaacaaaaacaagaagtccttaagattagctaaaaataaaaacaaataacaaaatagcactactccacttaatcgtttatttttgaaaaatatgcacttgtcattttgtcctttttttgcatagttataatcgtgataacaagcgtagatcattccaattgatccgattaaataaataataatcttaatgtaatcaaacataaaaccccttccccctaaattggattgaaaagacataataattataacagtctgacattaacatttaaacgatattttaaatggtgggatttcttaacttttggttgaaaatattcctaaacttcagtttaaacttatcataaattcgtgataaaaacttgtacaatttcctatactccgtatccgttataaacaataaatcaagggctatcattataacaccaaattgaagaagacccataaatataattatagataaatgaaaaagaattgaacctataagcaggggaattttaaaatacctattccaaactaatattggaaacattagctggagaaacaatgctgagtatgttcctaatactagaagataagggttatcaataacgagatttgtaaaccctttgtttatactatattcatcaacctgtagtatatagtaaagtgcggtcccatgggtccacatttttccttgcgctttgttaaagcccgcaaaaaaataaagtaaagacacttgaatcattgaaatcatcactgagaaattgtgaataataatagtaactttagacttttctttcgaacgggattcagtatgaatagtaaaaaactcacctaaggatgcaaaaataagatacaacataataagaataagaatattattaccaccgtcatgtatgtaaggattcctttgatataaagaccaaacccaaataaaatttatgatgctgactactctcattttataccctaatatatacagagtattaatgactattccacttataaaaataaactcaaaatataactgtgagtcactaaaaagatatagagaagtaaaaccataagcttcaaagcatttttcaaatgaataaaaagcattaggtccccatatttcattcctttgagcaaagtgaattaaataagtaaacataatatgtaatccaataaatatccttaagatgcttgaacctattaaataatgcattttatttgacattaaatgattaaaatttctgaacttatttaaaataattttcaaattaaatctcattcctttgttagtaaattgatatgggggaactgctgtacattaaattttgacttccccttctttccatactcaggaaacgattctatagacaacttaacatctaatgattctaattttactttcttacttctctctatttttttcacagctatactagatataatttggatgtactcgttctcaattaattgtttattcttctttttatcattcagctttagatacggttgaacctcaaagacagcaccagaaagcgcagttttcattaatctgtttggtgaaaataaattgtttttaatgtctgcattataactttctgtaatatctatccactcagtatattctttttgtcctttattatttgtaaagacccccctgcagataatattgttatttgtgcttaccggatctggggcaaataattgccagttttgagtaaataatggattcatatacgttgaaattaatttctcatgcttaaagttaacaggatttaacggcaagttatacattatcattattattgtatggaatactactaataaagaaaggaacaaaacaagtaaattatatttcctctttgtcttcaaattatacaacctccatttgaaaaggaagggaggccccttcctttttacctaccaaattccgcaacttctgaaatatcaatatccttgtgatcttgaggattcactatataacatgcatattttctagcaggagctgcactatatatagattgtgcattagctttgtttgcttgttttcccaaccaatttccagcggctttaatgccatcataaactgctgcactaacaataccggcagcaactccagcagcaaatgcattttttgttgtgtattcatcttcaccagtatttaattcaatatgttttacctgtttaatatgctctggtgcagcttgcgttgtataagaattcgcaaaaaatgttactcctaatacccctattgaaattgtactaaataacttttttttcataatctaattccccttatacttatttttatcgaccgaaacacttagccttatagttcctcctttttgaaaaaatggaaatacaaggacataataacatatcatttttttatatgtaaacactttcttacaatacatctatgatcctatgagtcgacatctaaatctaaaaataggtttttcaatttaattaaaagggttattgggagttatcccaataacccttagttatattcactaaaataaccgtttcaaacttttcttcagtgacggcatttcaattttttggttttcgaagaagtttttcagcatgtatttgctaaaacctttcgcctgcccgtatgtgattttgccaggaagcggcggttcgtttccaatcatgacatccacaacgaccggttggtcagagtgcagcgcctcatggaatgccggcgcaagctcttccgctttagtcactttgatgccctttgctccgcagctttctgcaaatgcggcatagtcgacattttgaagttttgtgacatagtcgatattgcctttgacctgctgctcgtactcaatcatgccaagattttcgttgtttaaaatgacgactgtgatcgggagcttatatttgacagcggtcggaagatcctgcatgaccatggaaaatcccccgtcaccacagacggcgatcgcctggcgttccggttcggacaagctcgcggcgatcgctcccggcaggccgcagcccattgtcgcaagccagctggaaacgatgaaatcctgattcgcgttcattttaaaatgacgcgccatccagactgtcacagtgccgacatctacagagagcaccgcatcatcggctgccgcttcctgaagacgggccacgacctgctgaggtttaagcggtgttgttgcctctgtctcatctttttcaatttcgttccaccaatgctgcatatgttctgtgcaggcattcaggaatcttctgtcttccttgcgttcaatatactctgtcaattcgcgcagaccgagagccgaatcgcagacaaggcccgctgtcaccggataccgttttccgatttttgccgggtctgaatcgagctggattgccggcgtgtcatcaggcaaataatcacggtacgggaatgatgttccgagcatgattaataagtcacattcctccattgcctcgtaagccggctttgttccgatctgcccgaggttgccgagaaaatgcgggtgcttatcgggaacaacaccctttgccgggagtgtaacaacgatcggagcggcggctttgtccgcaaattctaagagctcccgtttcgcctttttcattccctgccctgccaggataatcggtttcttagcgttattaatatattgggcgcaggtgacgagctgttcttttttcggttcaaggttcccttcaatatacaccggtgaagtatacacgggctcgcgtttgattttctccgcaaacaaatcatctgacacgctcaataccgcaacgccttttttgctgtaggcggtcctgatcgcctgatttaagagatccggaagtgattctgcgctatgtacctctctgttgaacacagccacgtcctcaaacatttgctccagcttaatctcctggaaatagtcccgtccgacttcgccagaagaaacctgtcctgcaatcgccagcacaggggcgccgtccgcttttgcatcatataaaccatttaataagtgcaccgctcccggccctgcgattgacagacagactccgatcttgccggtgagttttgcttcagctgcggctgccagtgccgctacctcttcgtggcgggtttgaatgaacttcagttgatttctttcgtgtcttaattcttcaataaactcatttatactgtctccggggatgccgtatacatgatcaactccccattgctcaagcagctctgtcattacttgtcctgcagttttatgtgccataacgtatcctcctttttccttttttcaataccacaggagaaaggctttaaaacccggagacctgaatcacttgccaagtcttcttttcaacaggtcgatcgccgcgagcaaccctctatccttgacggtgacatttacatcttgagcgccattcttgaaatcattgatctgcctttttcggttcggcaccataaaaagcggcaaacgctccggggaaacccactttaatcccgctgtctctgtgccgtcagccactgcttgtccgcctgttatgcttccgaaaaacagatgctgttcatcttgaaactttggcctttggtaaacacctattttcgcagaaagcgctgcattgtatcccgtttcttccaatatctcccgcactgccgcttcctcagccgattccctgggatcaaccctgccgcccggcaaatcccatagagggacatcttttcgtttcaccagcagaatttgctgactttcgttcaatacgatcacaaaagcaccttgtgtatacaccgccatacctccttttcccgcaaaaaaggaccaaggtgattcccttggtcctagagctttactttttaaaatgatacggcagtgtggcaaccattatgtcctttttccagaacagccggactctgaggaggaaggccgattggttgtgaaggatggtgtgccagcgttttttcgttataaattgcggaaacagcaccataacggaaaactgctccttcttcgcttttgcctcaactgtttccaaaaacttatcaaacggatggacaaggcttctgtacgaggagtgaagcgtaacgagacgcacgccgttattaagctcttcccagcgtttttcgaatttcttttcctgttctctgtcaaatgacacgtgaacggcgatcacctgatcagacagtgatttcgcatagtgaatcgatttttgcacgacggtggtgacaccggccacaggcacaatcacaacggtgcctttgatttcttccggctctttgtctacgatgcgaagctgttcaccaaccgctgtatagtgatttttaatcgcaaaaaacagcaaaacgacgataggcataaagattaacacaggccatacgacattaaacttcgtcacaaacagaatggatagaaccataaatgatatcagagcaccgcaggagttgatcagcatttttccgatccagccttttggtttttgcttgatccatttaacgcacatgccggtttgtgaaagcgtaaatggaataaatacgcccacagcatataacgggattaagtgctccgtctgtcctccgaataagataatgagcacaatggaggcaaagcctaaaaagataatcccatttgagaagcctaagcggtcgcccctgactgtaaacattcgcggcatatactggtctctcgccaggttgaaggcaagctgcgggaaggctgaaaatcccgtatttgccgcaagaaccaaaataagcgatgtgacaccttggatgacatagtagaacacattccgcccgaaggtttcggacgcaatttgtgaaaccactgtttcatcaggtttcggcgccgtaccatacccgtacgcgagaaccgtgatgccggaaaacagaatcgccagcaaaatccccatcatcgcaagcgttctcgccgcgtttcgcgcaggcgggtttttgaatgcaggaatcgcattagaaatggcctctaccccggtcaacgctgagcacccggaggaaaaagccttaagcagcaaaaacagcgtaatgccggctacaggtgtgccgagcggtgtatgatgggctggctggtctatttgtcctgtcataagtttaaacaacccgactgcaatgagaaccaaaagcgccaccacaaacagataaaccgggtaggcaagaatggatgccgattccgaaagcccgcgcaggttcaaaatcataatcactaacacgagaaaaatagcgatcggcacatgataatcatgcaatgcaggaaaggctgacgtgatggcgtccgtgcctgcggaaatacttaccgctactgttaaaatataatcaacaagcaatgaaccgcccgcaatcaatcccggtttttcaccgagattttctttagaaacgacatacgccccgccgccctgcggataagcgtaaataatttgcctgtatgaaagaatcagtgcgagcagcaagatgagaacgccaaccgcaatcggaatggagtaccaaaatgcggcagcactgattgttgccaaaatgattagaatttgttctgtcccatatgcgacagatgacagcgcatctgaggaaagcatagccaaggcttttaatttcgtcagtttttgctctccagctgcttgggattttagtggtttcccaatcaaaaaacgtttgattgaatgatacatcgatgtcttccccttttaatttctcatttttcaattaaaacaataaaacatcagtgtcttgctctcacatgttgatgatagtcctttctgctatgatgtctctgtatgcgatttgcattcaaaaatgaacaacaaaaaacacagaggcaaacggatgcccctgtgccataacatcgaacacaggtttcattcatctcctctcacgaacgcttacgaggttagctgacggattcgggcatatgagagttagccctacctaaaaaggattcaccccaacggcaaaaagccgttctattgggtcccccgctctgatttcagattaagcgatttgttttctaaaagagatcatactcccgttcccgcacgttgtaaagaggcttattggctgagagaaaaaaataaaatgacaggttccacaaatggaatttacttaccaaaaataaaaaaacagaggctaaaatcgcctctgttttattctgtatctgtctttctttttctgcgtcttactgcaatccaaatgaacactgccgcaaccaccataatgagtgccagcacaccaatatacatccatttctggctatgatcctgtgttggttgttctgcatcggaactgtttgtttccgatttgagctgctggtggtttgtaaacacctgctggctgtttgtttcattaaggacggttgccgactcatcgttgctgttcagataactgatgatctcttttgtgacagccgtgccatctccttttgacggtgcaaagactgccattgtatagcgtgaatcccaaaccgatgcttgggtaaataccacttgttttgttgtctcattcagcatctcgaaaccagatacatcaaacgagccgttcttttcctgcggcacaagcagatctgatgatttctccttcagaagagaaaattgattgatcccccctatgaaaatgaggtttcgtcctttcgcatcctttgctgtaacgtcagatgatttctttaccgtatatgaatgctgtgcttcgctgccaaaggattccgttacgagagaaagctcctcaagcttcgattggcttacggtgtcaggaagcacgattaatgttgtttgatcctggtttccggcgtaaggaagcggccactcttgaaaatccgctgacggagacatgcctttgatggcgtatgataatgtactgtttttatcgataaaaacccacttttcttcatcagtggtgttgcaagggttgttttcctttaaaccggtcgtgacgaactgaatatcaatgtagcggtttttttgcagcagtttagggtccactttcactgtgacatgatagaatccgtttttatcttcttttcctaattcatcaagtcggaccgagtgcggctggccgttgatcatcactttcagttctgcggcctgagaggcagactcgttttcagccgctgaggcttgaatcgtttcagactttttcagtttcagcgacagcttcgccgattggttttcatctaaaacagccgaagccggataaaaataatgtgctgaagatgttttgtcagctccaattgtgatatcgcccgctccaaaattctcaagggtcagcttatcgctttcttttttttcagtctgctgaagcttgctgattgaaagtgtatcgccgctgagctggcctgtatatgtctgatctgtcatcacgctgatttttttagtgagcgcgtcctcggacgccgcttgcgcaaacagaaccggctgctgtttgccctctgctttcagcacccgctccgcaagcagaaggttttctccttttgcctgtagcccagcttgtttcaacagttttttcactttgccgttccaatgcttgtccacgccgataacaattgtcggcttatcgatttttttcagttcagattccgtgacatacgcaatactgacactgctgtccaccgttttcaaatagccttctgttttaacagcagcttctatttctgctgaacttgggttatccggaatgacgatggctgtttcttccgctgtatttccagattgggcgaaaggatacggataatggtccagcgacgttcccttcgctccactgctgtcagcaagtgtcagccggctgtccggataaattttgatccagttgcctgatgtatcctgtctgacgcacacgccctctttcattacgccgtagaatttcagcgatacgttgtgatagccttgcgcagactggcttttattcagattcagcttcactgttttccgtttggaatcaccatcaagctttaacgtcttgaccggttcatcatcaatgacagccgttaacgatgatggagaaattaaaagatttgatgcctcgtattcgattaccaattgctgattgcccgaagaggcgcctgccgggatctgatacgtcagctctgcgctgtcttttgatccatacagtgtaatcagctcgcttgtcagcatctgctgtttggcttgttcttggctgcttttcccgaggagcgaaccgctgacctgtacgtctttggcaagagccgtttgtccagtcatcgccagcagcatgaagcttgtgagaaaaatcattatttgtttcaaaaaggtcacccgcttttatgttgattgtatcgttctgtcttgtaccatttgacctcttgcttgaataaacggtgcttgatttccacgattaaagagtagataacaagcacaatccatgcctgcgagtatgtgaagtacatgagaaatacgataaaaaagttttgcttgttcatttctgttttttcaatgctcaacgtaatcatgacctctgtcataaataagaaaaacgccaaaatccagagaatcattgctaaaaatccaaccgacaaatgcaaatcataaaacaaattcactacaaaaatcgcatttgacatgatcacgccaaagaaaaacaggaagtacgtaaagaaaaaataaaacaaatcaaagataatccgttttcgtttcagcttaaaaaactgcgccaaaaatttgagcacgacatattgattgccgcgcgcccatcgggtgcgctggcgccaccataccttccatgtttccggttcctgctcccacgtgatggcggcagggaaaaagcggatatgatagccgagattatatacccggatggtcagctcagtatcctcagcgagcgctttgtcatcccagcctccgagcttttcgataatgcttctgcggatcgcgaagttggtgcctgggatcgtggcgattttgaaccacttccatctgcctccctgggccatccactgaaaacagatcgtttcgatattaataaacctcgtcagcagcgtctttgccgcattgatgacgcggaatttccctaccacggcgcctgccttttcgtcattcatcaggccgagcacgaggtaatacacggccattttctcaggcgtgttgtcagcgtcatacacacagatcacatcgccattcgattcagcaaaacccgagttaagtgcagaggattttccttttcctgcatttggcggcttcgtaatcaccattttgatgaaatcgtatttctcggaaaattcattgacgatatcacccgtccggtctgatgaattatcattaacgacgataatctccagccggtccttcggataataaaggttgaccatcgccttcagcgtctgccgaatcacaacctcttcgttatgcgccgggatgagaacgctgaccttcggcagttccttcatgttttctctccacttcgggatattccgttcgaaggtcatatagtggcgaaacccgccctgcatgagaaacatgtggtagagaagcataacccatattaaacttagcgagataaagaacagcgtattacccaaggcttcttctctccttaaaaattcgttttttcaatgtggctctcaagtaaaacgtataactgacaaacatgatgacaaataagagcacaacagcggagagaatccataacgccttttcaagaggggtttgccggtgatgatcgaaaaactcgtcaatcgcgcttacgccgtttttcacctgaatcgttccgtcaccgcttgtatgaatttccactttgtctgttttgacggtttgtttcgttttctttaaatcaagccattcactgtctggaatgcgttccatctgatcaaccagctccggcagatatttcatcccgaggtacgggtgataaaatcctccggctactccgccttcaaaatcaatcatctgggagatgtgctcctccatctcaccgaacgggttttgcttcgatgtgtcgacaaagccgatcgtttccggataaagcgtcattccgtgcaacatcgaaggagcagtcacaaacggaggtgcaccggatgttttccatgttgtgctgctgagctggacctggccgaaaatgcttgtaaaatactgcgaggcgatttgatagccataatcggacatcgtgtaatgcggcgcttcaaacgccagcgggtaaagacccgatgatgtcaaatcctcaatggcacgcgtcagtttttgttttgtatacgtttcttccttttcccgaaatggttcgagatagctgtgataggcttgttcgttcgggaagtcctgttctttctccaaaatggacggggggtcttcggcatttccggatgtaatcggctgatccgcctttgcatcccaaaattcaaagccctctcctgtttcactgtagcgataagcgtgagtatagccgtgaacaatgatactgccgcccatgctttgcagcttcttcagcaccttgaccatcttcggttgatcagacaaatacactttgtcgcctgtttccggattcaaataaaccggaatgaccgccaggataaaaggaatatgccgcttatgcaggtatgtaccggcttgaagcagcaatttttcatcagacatcgggctgatatcctcgagacgcaaatacaataacgtcgtccccgccttctctccgaaagcttctctgagctgtttcgccacgatcaaattgtcatttaacaaatttgttaatccaatgtacacattccctttttttgttttccatataaaagaatgtattgtgccgtcatcggctttgaaggtgtaaagcgccgttcctttcaggcctgatacactcagcacgttaagcccgctttccagagacacatcggccttttccgacctgctgtgaacctgaaacacattttctttgcgggctaatgaaagcccagaaaattggctgatttgacctgcgttatagccaatggcgacaaccggtttttttacgccgctgataagagacagcagttttttgctgagctttcttttcgtttggccgtaataaatcacatggtctttccctttgaaatccgacgcttcaacgtctgaatcttttttgactgtcacatgggatgtaaagtggcccgcaagcaaatcgagcattttgacttgtgacgactctttgccgtccaaggttgagtagatgatgagaataccggcgtcctgatctttcgcttgcgcagaaacgggaaaagacgtaatagccgaaactagaagcatcatgacgcatagcaatgtgattcctttatagttcattcatcatcatctcgttttccagttcttctaaaaattgatcagctgttttgatatcgttgcggtagggcaagtaacagacgtggaacgtaagcgacacatactttccattttccagctgatacgtgtctaattgttttttcagctttgtcaggacggctggcatatgttcagcaggcgtgtgcgtcagcacgatcccgatacgctcgtcagagggacggaatttcttatccgtttcccgaacgcttgtcctgatttgctgaccgacatattggaagaggcggtccgtttctttttcaccgtacaaagacttaaactctttgaaataatgcatatgcagcagcaaaaaaacgaaagaattgccgtagcgctccgcccgcttgatttcttctgaaagctccagcttcatcctttgcttgttatcaaaaccagtcactctgtcaacagcaacatagcttttgatttcggattgaagccgtgttattgagcgccgaagctctgctgtaatatcgtggattcttccagaaataaaagaaaacagcaaaagcgcgattccccacacgacaagcattcgcagcccttcctcagccggaaagagcgatgtctgtccagtctggaaaaacatcattaaggtgccgagaacaaagagtacgattaaggtcactgccagcgcgtaaatcgggccgaaccagatgcctacggcgatgacgccaaatgtgatgcaaaggatcagagcaccttctgattgctgggctgacacataataaataaacaaagacagggccgcgatgagccctgaaaaataagcaaataatttttgtgattcactgaatgatattttcattaaaaagcttcctttcggctaacagcggcagcagattgtcaaatgaatgcgtctgagtgccgctcatatagcctccataatacgatttcaccggatcatgaatttcaaagtcattcattctgtcatatatggctttgatgacagaactgttttcatgctgttttgtcaaaaacaatacggctaatgcatatacggatggagactcatattggacggcaggctccttcgtatctgccgaataccgcccgtacagctttccgtttttctgaaattcctgcttgatccagtccgctaaaacagatgctttttcatccccttccggcaaatgccaagcagcgtaaagctgatcaatcaggttgatttcactatcatatgtgtattccttcgtctccgagctgtatgtcttcggcagaaagccattttttaaaggagctgaatagagaacattggcattccgctgttctgtgtcttcgtctatgattccattcttctttaagacagctaaggcgtcaggcatgacgtatgaaagcgtcacatcctttgaagcggcctgtgagtcgtaatagtctgtaaataacccattgttcatattgtatgtcttcaaagacgtgccgatatccttagccgtttgcgcgtagtcgctgcggccccattttgcggcggcttggtcaagagacaacataattctcatatcatctatcagcgcattcgtcccgctcgcttggccattttgaatcttccacgtcaccaagtgattgctcatcagaaatgaatcagtcagatgctgatattgatcctggaaatgcggtgcgtcatttttgctgagcagaaactccatccacaggccgagagattccgacaagtaagaaggctggtctgaaaaatcggttttaatcagcccttggtcattcattaaattgtgatagatgaaatattccgccggctggatcgggctggcattcacttctgtcgctgactgattttgggtcttgtttccagcttcagcacaccctgcggaaagtccgatagataagaagaataagatgacagcaattagtacatgcctcacaggcaaatccccctttgtcgcctgaagcaaatcagacgctcacaaatagttatagacgaaaatatgactgccatgttacaaagtacatttactataaaagaaaaaaatgcagattgctagcttttttttccctttttggacattaagaaaacaggacctaagtccactaaaaaaacctgtgcgataggcacaggtttttttattatttatccaaaccgagttttttcagctgttctgccagcgcgttgttaatcggctcatctttattttgttttttcatataagaggatacgtcccgtttggtagcacgcgctttgtctttgttttttcgtttttcaaatacagagagcttttcacggtgaccgcacacacacgcaaaggtttggccctcgccttggccgcgaagctccattcttttatggcaattcgggcagcgtgcgtttgtttttcgggcaatcgtttttctgcttccgcattcacgatcttggcacacgagcatcgtcccgcgtttgccgtttactttcagcatcattttgccgcattccggacatgccgttcccgtgatgttgtcatgtcggaaggtttggctgctgtttttgatttcttttaccgtttggtgagcgtaagccttcatatctttaataaaaacagccgatttcaatttgccggccgcgatcgcagacagcttttgctcccattctgctgttaaggccggtgatttcagatcctccggaacaagctgcaggagctgttttcctttagaagtgataaaaatatcttggttttttttctcgattaaaaagctgttgaacagtttttcaataatgtcggcacgcgttgccaccgtgccgaggccgcctgtttctccaagcgttttgacgaggcctttttcttctccctgcataaatgcgcttgggttttccatcgctgacagcaaggtcccttcattaaagcgggcaggcggcttcgtttggccgcttgtttccgttaacgtgcggacggcaagtgtgtcgcctttttgaagcgcaggaagtgtctggtctctgtcatcctcctgctcatcatcctcatccgccatatcataaacggctttccacccttgcgattgcacggttttgcctttcgccgtaaaggtttctccgccgatttctgcgatgacctttgtttcctcatattcgaatgcaggcattaatacagcaaggaaacgtttcgcaatcaggtcatacagctttcgttctttatcactcagactgctgagaacgagcggctcttcggtcgggataatcgcgtggtggtctgacaccttcgcgtcattgacatatcctttatgagatttaatgccgcgttttttaatttggctgacatattgggcatacggttttacttccatgccttccagacggtcttttaacgtcgggacgatgtcactggataaaaatctagagtccgtccgcggatatgtgacgagcttatgctgctcatatagcttctgcaggacagaaagcgtttctttggcagaaaaaccgaagcgcttgtgggcgtcacgctgcagctccgttaaatcataaagcgcaggcgcaaagctttttttcgctgtttttttcagctcagctacgaccgcttgctttccttcgaggttttttagcaaacggcttgttacatcttgattgaacgttctcgtctgctttgatttcttatcctgccacgtcagcgtcatgccgtcgactgcagcacgtatgccgtaatacggaacgggcgtaaacgcctgaatgtctgcctcgcgctttgcaatcatggctagcgtcggagtctgcacacgaccgcatgagagctgggcattgaattttgtggtaagtgcacgggtggcgttgatccccacaatccaatccgcttccgctctggcgacggcagaatggtacaggttttcatattctttgccgctgcgcagcttctgaaaaccttccttgatcgctttatccgtcacagatgaaatccacagccgcttgattggttttcggacattcgctttctcaatgatccagcgcgcaacaagctcaccttcccggcctgcgtcagtcgcgatgacaatctgattgacgtctttacgggtaagctgggatttgactgcattgaactgctttccggttttttttattaccacaagctttaagggttctgggataatcggcagatcctctaggcgccatgattgaaattcttttccgtagccttctggatcagcaagcgtcaccaaatggcctaaagcccaggtcacaatatattgatcgccttcgagataaccgtttccttttttatggcacttcagcacccgggctaaatcccggccgactgaaggtttttcagctaatacaactgtttttgacatgcttgatcacttctctttctttcgcgctcatcctgttattataacagacttcacgcggcactctctaaccgcgcccgtttttcgtgtcaatttctgagaaaatgacgtgagtgacggtttgcgcgtagggcgatgttttgttaatgaaatcttctaccgcttcgaggctttcggcattgattttcagcatatagcaggctgcacccgcaatccggtagcaaaattcaatattcggcaatgtttgaatatagcttttgaaccgctcgtaatccgcgtttttaacggttgcttccacaatgcaggaaacgggaagccccagttttttctggtcgacctccagcgtgtattgcttaatgatgccaaacgattcaagctgtcttacccgttctgtcacagatggaggcgacagcttaatttttctgcctaattccctcatcgacaaacggctgtccttcttcagctcctcaatgatattcagatcaatctggtcaagtttcatttcaacatccttcttttttgattttgtacacattatctcgggtatttttgtaaatgacaagtacagttccctagaaaaggcatgtaaaaatgaatgttttccgaacattttttgaaagctgtcatatgcccccccagattgtttatagtataaaatgaaaacgtgtccacaaggagggcgatttatgctgcaaacgccgatcggaagacttcgcacgatgggttttattgaaggaatgtcactcttaatcctgttgttcatcgctatgccgcttaaatattgggcaggccttccgcttgcggtgacaattgtcggttcggttcacggcgggttgttcattttgtatttacttgtcttggcttatgcaaccttctctgtcaaatggccgctgaaatggttagctgccggcttcgtcgccgctttcgtcccattcggaaattttttgtacgaccgcggattaaggaaatataaataagggaacgcaaaaaaggctggatttttatgatccagccttttttattaaaaccactttgtcagccacgcgatatagtaggcccccggaataaacatgagctgggcgaggagtgtgcccgccacccttgatgtgaccattgtgacagaggtccattttaaatagatatagcttcgttttccttttgccacatcatcagctagaacggataccttaggatcaacaaaaatggccagtagcatcgtcgcaattccgttgattaaacccgaagccatgacggctgtcgtactgcgctccggagccagaaggcctgcgtataaagccgaaagcacgccaatcgtataaatcgatgtgatcagcatgttgatgacaaacaaacgcttcggaatcaagcgcatatgaaatccttttacatatgaaatagacggcagacgcaaataggaaagggcatttttgaatccttgtttcgagaacccctttcggaaaacttgaaaaacggagccgccgccgcccgccaagtgaataatcgcccgtgaaaaaagagcgacaaaagacgggagcaggataatgcccaaaatggtgccgactgtcgatccgaaaattaaaaagcggaactggtcccctacaatcgccagtgcgttttttccagcatcatcaattaaatgcccggtaaagggctgctgcaccatgttcgacattctggacacgatgaccatgacattaaacagggaaagcgcggacgcaataaatccaacgcgggccccggaaagccttgtagcataggctaaggtttctatcgagtgaatcagcaataaaaaacaaaaaataaaaagtacttgtgttgtaatgacatgcacgttattcttcctccaatttcatcctagagataagactggaaagaagacaaggaggtttcagtacgatgtgttttttgcaataaaaaaaccgtccggcgtacgccgggcggtttgtcttattcttttctatacgcaaataaagattatatcatccgccaagtcaggcgggttagattcataaagcattgttccgaagaatcattctggaaagtaaacaccatggaaatttcttgaacacaagacaacgaaagccctacctctcaatcgtcactgcggctccgaagccgcgccggtgtgaattgtaaaacaaaaaagtcttttttccatctcatcgttaggggcgatttgttatgaaggaaaagaataagggcagctggttatgctgcttgggaagcggtaagcttctctctcaaaacagaaaaaagaagtttactttcttttttatttgcttatttttcttactagctattcataataacatatcgcccctgaaaacacaaattttttatagttcgagtgagaccggtgttttctccccggcattcattaatctgatatcctccggttcaatttcaagaatcaccagattcggatcatccttgccgtcaaaccagcgctctaatttggaactccatattttgtccttgagttctgccgaattgttgattttggcttttccggcaacttcgacatatgcgtcgccaaagccttcacaatcatagcctaataaaatgtggacattggggttgttctcaatttcttccgctttatgagtttccttgcttgtcggtgtgtaaatcgtcagcccgtcatggaaaaaagtcatgtagcgggaattcggtttgcccttttgaactgttgcgagcgaacctactttatggtgatctagaacatcaagcactttttgtttaatgtcttgctgattcatctcgaatcactcctttttaacgtctccgctgttacttttccacatccggggaagatttaaacaagaaagtgtgctctttatttttcgccttcccattcacgctttaacagactgtagtagacgaggtcgtgatgcctgccgtttacgtataagccatcccgtgcccttccttcctctagaaacccgatccgctccggaaccgctctgcttttttcgtttccgacagccgcacagatcgccacacgattcagctcaagctcttcaaaagcatacgtaatgagttttcggcaggcagctgtaataatgcctttcccttcaaagtctttagcaatccaatatccgatttcagcctttcgattcacttgatcaaggttatgcaggctgatcatgccgcataggctgccgtcataaaggagccccgcctcaatgccgttcaggtctgcatactgatgccgccattctggaatgatggtttctctgtacgtgtcagcgctgcttggattttccgcccaaaacagccactggctgagccgctgctgattttggataatgagttcggccagccgctccgcatcattcggctccaataatcggatggtgatgtgctcatttaccttgcaagtgaacatcgcttcgccctctttcctttttcacccattatatcgatgattctgtttttttcaatacaaaaaaggatgggctgctaagcctcatccttatattcttggatcggtaaagatatcatgtttatccgtgctcgtcgatgacatttccgtcacgacggcaccttcttccccggcctggaaccaatgctttgtattcggggggattgtatattgcccgcccggttctagctcaatttcgtgccagaccgtatagtgttctctgtcttcctgaggagggagaacttttggaagtggcgttttttctccttctacgtaaagatacacttttccgtagcggcagcggaaggtctcctgcttgccttcctggccgtcgaccggcggatggcggtgttccgggcaagtctgtcccggaaacagcaccaattcctttgaacaataacggtctgtattgacgtagacgaagagctggagcccgacttttctttcttttcctaagccgtaatccatcagctggatttggtctacttcctcgtccgttaatacaatccctgctttttgatagtagctgttcacttcttctttcgtgatgcccatatgtctcactccctcttatgtcgtcacaaagtttccgccgttgacatgcagggtctgacctgtcatgtaagaggactcatctgatgccagaagcacataacagccgacgtgctcaacaggctgtccaggacggcccatcggcgtatcttgcccaaattgagcaactgtttcttcagggaacgtagctgggattagtggcgtccaaattggacccggcgcgactgcatttacacggatgccgtctttgacaagcgcctgcgccattgttcttgtaaaggcattgatcgccccttttgtcgctgtataatcaatcagtgtcgggttccctacgtacgggttgatggatgtcgtattgatgatggcgctgcccggtttcaggtaatcaattgcttttttagtcaaataaaattgagaataaaaatttgttttgaatgtgcggtgaagctgttcgctcgtaatatctttgatgctttccttcggatgctgttcacctgcattgttgacaaggatgtcaaggccgcctagttccttgaccgttttttcaaccgcttcattgcagaattcctcttcacctacgtcaccagcaatcagcaggcattttacgccttcttgttcaacacgtttcttcgtctcctcagcgtcttcatgctcatccttatacacaatggcgatgtctgcgccttcctttgcgtaagcgacggaaaccgcgcgtccgatcccgctgtcgccgcctgtaataagagctacttttccttttaatttgtctgctcctttataatcctcgtactcatacaccggacttggattcatttcgctttcaattcccggctggcgactttgagtttgtgccggcagttcttttggataatttgccatgatgattctcctcctttgttttcatgtctatttgttgtgtacctcacacactctttggataaacatggcttggcaccttcgcattgctttatcagaaaaatgtttcacatggaacgcttggaggaaataactcaaaaaggaggttggttgctgaatgattaacatgctttctagaagattcagcaggccaaagggcgtcatcggcatgattgccgggtacatcatggctgctgaaaatcaaacactgaatcagtggacaatcaatcagctgggtatcacgcgcggggacagcattttagaagtcgggtttggcccgggatactgcatgcagcagatgctgaaacgcgagaaggatgttcatcttcatgggattgatgtgtcagaggccatgctgaagctggccgcccgcagagtgaaaccaaagggcgtacgcctgatacaaggaagcatcgagacatttcctctccccgcctcgttttatgataaagtgatttccgttaacaactacaccatttggaatgaccaaacaaaaggcatgaaacagatttatcgggcattaaagccaggcggcaaagcagccattacgatgcagccgcgggaagcggatgccagtcctgaaaaaaccaaatcatttggaagacagatgattgctgactttaaagcagccggcttcgaagacattgatatacaatttaagaacattaagcctgagctttccgtctgtgcaagtgcaaagaagcccgccacataaagtggacgggcttcttcttttatgaatgtacagcctgattgcgcaggacgtcttttttcaccttgccaaggttgtttttcggcagttcgttaacaaattcaacttcaggtattttgtaagcggacaggcgttctttacaaaatgcgatgacatcctcttctgtgatgcgctggccgccatttttcacgataaaagctttcggtttttcaccgtaaagcgggtctggaataccgaccacagccgtttcaaggattcccgggatctgctggataacttcttcaacctgatcaggatagacgttatcgcctccgtaaataatgacatccttgtagcgtcccgtgatgaaaataaagccatcttcatctacatatcctgaatctccggttctaaaccatccattttgcagcactttcgctgttgcttcaggattgtcttcatagcctttaaataagaatggagtatgaacaacgatttcgccgatttctccttgaggaagttcttctccggtcagaggatcttccactttgactttaacacctgccacaggttttcctgcagatgccgctttatccattcccatatcaggcgtccatgtgctgatgccccaagcctcagtgcttccatagccatgcgcgagcggaatgccaatatcaagatagcggcggattaggctgctcggcacttttgttccgcctgtcattaaaataacaagtgaagataagtcagtttggtgcgtttcccacgcctcaagcaaatacgtgtaaaacacaggaagagccatcacggtctgaattttctcttcttcaatgaccttcagcatgtgaacaggatcttgatcctttgtaaacacaaaggttgtttctgcaaacgttccaagcatgatgcaaatgagcgcactcgtatgataaatcggatggcacgcgagaaaacgaaggcccttcatacgtgctattgagctgttggattttttaacgtatctgtatatgccgccatgtgtaatcatgcatcttttcgggtttcccgttgttccagatgtaaacatcagaagtgctgtatcatcaggtgaaaccatttccgtctctggcaaatgatcaggacctgcaaacagcgcttcaaattcagcagatgtttcgtaagctgttcctgtttccattgttacacacagtgaggacaattcaggtagaacttcatccagtatctctttaaactccgctccgtaaaacatcgctttcggttcacttgcttttaaaatgcctgtcatttcatatggtttcagctgccagctgacaggtacgacaacagcacctatttcaagcgcggcgaacataacagttgatgcgggatggccgtttttgcaaagcaatgcaacacggtcgcccttttgaattcctttttgaagcatggcattcgccagctgattaatccgtttacggtaacctttatatgtcagtgtatggtctccgctttttacagcctctatttcttcgctattcggcatgtcatgcagaatcagatgctgtaatgtttccatatcgtcatctcctatattctcttgaatcttcaataatttgttagattttcttccttacctcacccattttaacccaaaaaagataacttgtaaaactatttcattttggaattattccaatactgaatgataaaatagtcccacattttcttattttgttccccatccacagaaaaacacacgccaaatttttgacgtgtgccatgcaggtttacagtatgtttttttctttcatccatgtgaaaaatatgcggtttaaccgctgatacaattcttgttctccttcttcctgaaaccccgccatgctttctccgctctcgataattgccgagctgatcgcgcttaaaatctctgagccttcagcagataatgagccaggcgccatcatgacgagaatgcgtgtcatcctgagggtatttccgtccatgccatccacttcataggaggtgctgagatcaaacattttgaaaaaaggcaggacgatttcatcatttttgagatgataaagcgccatgtttgttccggggattcccaatcccccttgtttctcccgttcagccaggcaaaacgcagctttttccggatcacggatcaggccatccttcttcagctgttgaaaaagctctagcagaagcatgctatggtccgggtttgttttgagttgagctagcgtaaaatggcgcagaacatcttggataacttccatataccgccctatgctttccgccgcctccagcatgtcaggtacatcagcttgctgcgcctcttccttcgggcttctttttttgttaagtataaggggaatcttccgcttgatatactgcttgacctggtttgcgtcttcctcatttaatagcgggctgaccatgatgtaatcaatgttttcataaggaatcggtacagtggacacaatcatatcataggcttgaacatccttcccctttagctcgatcagggatgacatatcaaacgattcaatttccggcagctcttttttcagtctggaggcaagcattttcgaggagccgatcccgcttgagcagacgacaagcgctttcacttttgcttcttcttttttgatttcaagagccgagccaaagtgaagaacgataaaagcgatttcatcatcagaaaaggacatgcccggaaaatacttttcaacgccttcttcgatcgccatataaagcagaaaataatcgcgcttgatctgttccttcatcggattgtatatctcaatattttcttttatgcggctgacggccggctccaaatgggcaatcaagccttcatataaagagtagtttttcgtcagatccattctgattttgtctgaaataaaagcaatgagccgctttgtttgcagggctgtttccagctcaatttcctgcgctttgtattctgttttgtattttcgattggcgcttcgaagatggattgtaatatagccgacctccgcctctggaatcgtcacgccgaaggcacgttcaagctcgcccgcgatttcaagagccgagctggattccttcgcattcttcagttcctcaagctcattttgctccatggtgatggtttccccaagcttaattcgttcgatcgcatacgtcagatggacgacgagcgctatataggagctgtcggacaatgaaaaagcgattttttctttgagctgaaataagatgcgctccatttttagcagctcacctttgctgacaaccccgaacattttctctgaagaatcggtttttcctttgatgtttaattcaaccgcttccaaaaacatttggatgtcgagacggttcacaatcaagttgccgacaattttccgtttcgcattctccggccctatgagctggatgccaaaacctcttttgcggatcagtgtcagtccgaagggagaaatccacttctcgagctcatctaaatcatagctgaccgtggcattcgtcacctggagatcatgagcaagcgtgtacagtttgacgggctcctgagactctaataacgaacaaagaatgagcagtttccgttcgtcggcgctgtattcatgctgttcatatgataaatcagtaagcagcttttgtttatcctcgggacttcccactgctttcaaccctttaccgggctgtttatctaacgtaagccccacggtttccatcagcggtttaattgatttgagttccctgtgaatggttctcgtgctgacttgcatcagctcagcaagctcagttacggttatatatctgttttgtaataataagtgctttaacagcttttgttctctggcagtcatatacataaaaaagacctcctagacaatcttgatgtgcggatgaagtcgcaaggagatgcagtagaggatatagagaggtttccttttaatataaaacgctttcaagaaagaatcaatcacttataaatggtaatttggcactatgcggtgtgacaatattgaaaaagcatcagctggtaagctgatgctttttatggaatatcgtaaccctgtacggctgtaaaaatgcggaaccattgatcctggtcaagcttgtatgacaacgcatttatcgcggcggaaatccgctcgcgctttccgcttccgacaatcggcatgatgtcggccggatgcgtatacagccatgcgtacatcacctcgtccaatgaagcggcgccaatctctgcttgaacggattcaagcgccgtgcggacacgccggtctttttccgtgtcaccagtgaaaactttgccgcctgccagaggcgaccaagccatcggcggtatccgtttttcctgacagaggttcaaagtgccgtcgagcatattttctaattcgtatgcggaaagctcaatctggttggttacgagcttctcaggcaaatatgattccagcatccgatactggtgatctttaaaatttgaaacgccaaagtacctgaccttgccagagcatttcaaggcctgaaacgcctctgctaccccctccggatccatgagcgggtccggtctgtgaatcaacagcacatcgatataatccgtcctaaggttcataagcgattgctcaacggatgccaaaatatgcgatttgcttgtgttataatgatgcgatctgtgagcgggccgttcaggcgattcaagaacgataccgcattttgtgaccagctctatgttttctcttaatccaggcgaaagggcaagggcgtttccaaacagcttttcgcacgtatagcctccataaatatccgcatgatcaaaggtcgtgatgccgtgatcgatacaccattcaatgaggctcagaagttcagcatctgaatagttccattcattcagccgccaaagcccgtgtatgactcttgaaaattgaagatcctccgccaattgaatacgctgcatgcaaaatccctcttttctttgtataaaccgggttttgccccttactagttcattcggcctcagatctcctttttcctttcgctccttttaaaaagacattttaattcgattgaaattgctttttcgctttctcaacgacatagtggctgccgccgcggtcctgcacattttggatcatcatggcgacaagcaggtctttgtttttgtaatcgtagccgacaaaccagccattttccgtgccgtctttatcatcttttgatgttttcagctcggctgttcctgtttttccagccactgtgattcctttcacgacaggctgatacgctgatccgcgctcatcttccacaacgcctttcagaccttttgtaatgtctgccgctccttccttcgtgaccacttgcttgtgccaaacatcagctgtttgtgaatcttttttgatcagcgtcggtttgacaaggtctccattgtcaacaaatggcgtgtaagcagttgccaagtgaagcggagacatttgcatttgcccttgtccatagcctgtatccgcaagcaaaatgtctgaatcaagcttgtcatttgcaatagacgatttctggatcgggaattcatacggaacgtcctctgaaaaaccgaatgtttttaagccttttgtgaaggtgtccgctcccatatcaagcgcattctgggcaaaataaatattgtctgacgtaataagggcgttttccaaatcgacttgttgaagtctctcagatacacgtgtcactgaatagccgccccagctcgaatctttttgccactccttgcctttgattgttttcttctcatcggctttaagggtgccgtttttgattccaatagcagccgcaatcggtttaatggtagaacctggcgcgtatgtcttattgaatttcgctgaaaacggattgtttttatctttgtttagctttttccattccttatcgctccagccgaaaataaatccgtttggatcgtaggaaggcgcgctgacaagggcgagtgtttcgcctgtcttcggctgcagcgcgactgccgccccgctgtcatccttcagttcatcatacagcttcgtttgcgttttgatatcaattgtgaggtgaagatcctcgccgtcctttgctttcttttcagcgatgacttccccggtttgcggcacgtagatcttccagccagttgtgcctcttagcttgtcttcatacacattttcaagtccggcgataccgatgttagacgtatcgctgtacgttccttctttctttttcttcagttcttccgctgtaatggcgcggacatagcctgtcaaatgggctgtcttttcgccatacggatagtagcgggagctgacattcgttcttgttacgccttgtaatgacgtcgcttcagaaactaatttctcctggtcaggcttgacctttttgagcggcacaaacgaatcgtcttttacccagccttgatccagctttttcttgatgtcgtcttcagtcaaatcaagttttttggcgagctcttttatgactttctcttttttatcgccaagctctccgggaacaattccaatttccggaacatctgtattgacggctaagccttttccatttttatcgtaaatttggcctcgtttcggctcaatgctcataatttgcacggttttgtcgtcagccagctgcttgaaaataaacgatgggtcccaatctatattccatgactcctcgtcatctgttttttctaatttcagcacagcagtattcttgaagctgactttgccggcatttgtgttcatgctgactttatacgggatatgtttcattgtcttgttgtcttgatcgtccttatctacttctcccgcagtgactttcaaattttttacgccggcctgctcatagatggctttatacctgttgacgaaatcttttttggagatttcttttttgacatctttagtcaggctttgatacatgtcatcgaattgctgatcgttccactgtttcacgaatgcttccatgcgatcctctggtgaatctgttttggagcatccgattaatccaatcaatccgacgcatagaaatactagtagaatacacttttttaacatgactttcccctgccttccacttgttattttctcttaattgaattggtgcgtgcaagatttttttgaaaatgaaggaaaagttcaccgattttgcagaaatctcctatcgtttgctgtagactatttgaaaagacagaaagaagggatcgcatggtcagggaggcagcaatgcttcacattaaagaaggccttgaacaagagtttgaggatgcattccggcaagcggcgccgattatttccggcatgaagggctatatcactcactcgttatcaaaatgcatggaggaaacgcataaatatctgcttcttgtggagtgggaaacacttgaggaccatacggaaggctttcgcggttcttcagagtatcaagagtggaaagccttgcttcatcggttctataccccgttcccgacggtcgagcattttcaggatgtgtaatagatttatataatatgaagtgtaaaaccgataagggagacagaccatacaaaaacggcggtataaatattaaaagcgcctgagccgtcattttcttttttgcgttcttcaagcccctgcataaacatgaccgcaccaagaaagacgagcatgaccgattggataacagaggtgtgttccgtatagttaaaagcaataagcgccagtataataatgataaccgcaaaagacattttaaaaatccgaaacaaaaggaccatccttccttatatacgaaatattgaacgttatggctatatttgcctacgccctccattattctagcgcactttgtttgtctgtagaacagaagacagagaattttaagtttcttttaatatttcgatcacacataaaaaacgcgcctgtcatgaggcgcgttttctatgaaactgataattctttatagcctagcttgtgaacggcttcagccatcgcttgatagcctttgctgttcggatggacaccgtcaaaggacagatattcctgttctttgcctttgaagatgctataggcatccgcgattttgacatggggtgctgatgcaagtgtttctaaatgtgaattaaacgaagtgatccatttgccggcgatatcaatttcgggaaacggattgtataagttgaacacacgaatggcgtacggggaaggattttctcctttaatctcggcgactttggcaatcatcttttcaaaattctcatggcaatgggcggatacacggctgaaaatcgtttcatccttagaggtttggtaggctaagaccgaatcgatgagatcgtttccgcaccctgtgatcgttatcatatcagcatctcgaatacatttttgcacatagggatatgacaggagtcccaaaatctcttctgtattcagacctgatctggcaaatatgtttattgccgttcttgttttcaagtcagcttccatcatgtccccaaaacgctggacgaagccgggtgaaaacagcccggagcctctccctgtcgtcaaggaatcgcccagagctgtatatcgaagcatcatgttctttcctccactcttgaacgtcgatacgttaatgtacgcagcagagaaaagattggctacttatgtatatcctatttttcttgaaatctgtaaagcggcgtccttcaccttttctgttaaatagggcagcctgtcttctgtaaatctcgcttcaaagcctgcaatgctaatgccggctgccacttggcgcttatgattaaagatcggggcgccgatcgccgccgtatagttttcgagctctgaatagctgacagtatagccattttgcacagaggcatcaatctcctgaagcagtttttcgggatcggtaatcgttccggagccaatcgaaatgagctcggtttgtttgatgtatgcttcgatttcttcacggggaagaaaggacagaatgcttctggcgcacgctcccgcgtataggggggaacgcctgccgatcgccgtatacagccgcacagtctgtgtcccttctattttctcaacgtatatcgcttcattgccgtccctcatgatcaactgcacggcctcatccacttcccggcacagctcttccatcaccggtttcgctatttttctgatatccagcctgtcagcgacaagctgtccgaattccaaaaacaccaatcccagcgaataagcgccggacgcatcccgactgaggaaccccatttcctccaaggagctgaccatccggtgaacagaggtcttcggcattcccgtcagcgacaccagttcacttaaggttaggcttggtttgtgcaaaaacaaattaagcagcgccatagatttgactacggttttgtttttattctgcatcatgcatcccctttgctatgtcagccattccatctttattctcgttttcagttcttttatatgctgttcccgttcaatcgcaagcgcttctgcttcctgaagggatacaggctcaaactggacgtgctcacccggcatgatttgggaaacaatcggaagatcagcggatatgatgtgcgcgatcctcggatagccgccagtcgtctgccggtctgcaagcaggataatcgggttgccgtcaggcggcacctgaactgttccgaatgaaaccgcttccgacaccatctcaagcggggccttcagttcgagcggttctcctttgagcctgtagcccatacggtcagactgcggcgtgacacgaaatgcttcttcataaaaacgcgtttttgattcttctgtgaaaaaggcaaattgccttccttccagcacccgaatgacgggattcttcttcaatggcagaaatctgccgcggctgactgaccacttcggtgctgcaaatccctgatttccaagctgcgaacttaagcgggaaaggatagtttgcgaaagagctgacatctctccaatgttcagttcatcttctttttgaagcgctctgccatgaagtccgccgatgcttcctctgacgtatgtgcttttactttccatgacggcaggcacctcgatgccgccggctgccgccaaataagcacggctgccgagtttgcaggggccaaagctgaccgtgctgttttccttgatgagcacaggcttccataaaggcgcttcctcgtcattaatacacagcgtgaagtccgcccctgtcacagcaatcagtgtctgttttgaaaaatgaaacgacggaccgggccccatcatcgttatttcgagacctgcttcattttcgccgtttcctatcaacagattggcaatgcgcagtgaaaccgtgtccatagcgccgctggccagaacgccgtatttttggtaacccgttctgcctatatcctgaaccgttgtgagcagtccgggctttaatactttcatgctcaattggactcctccttataggcgtgatagtctttttctgagatgcgaacgaatttcacaatatctcccgcccgcagcaatgtcggcgggttttcctgcggccggaaaagagccagcggcgttttgccgatcagctgccagccgcccggcgttgaaatcggataaacgcctgtctgcaatcccgcaataccgaccgaacctgcgggaatcgacggtcttggcgatgattttctcggagctgcaatgcgttttgacatcccgcctagaaaaggaaaaccgggcgcgaagccaagcatatacaccacatattcaccgtttgtatgaatgtcgattacttcctccggtgacagttgattgatcttcgccacctcttctaaatccggaccgaattcaccgccatagcaaacgggaatttctacaatgcggcggttgacctcatagtcttcggctatttctaccagccgctcttcgacatcgcgcttgaccttctcaaaaggtgagcttatgccttgaggcaaatgcttgtacacttcatacatatcataaaatacggttagacttgtaaaagccgggatacattcaatgaatcccggaaatggctgttcttctatataagcggccgcggcatggacaatgccgttaacctgttcattgatttcttctccgaatcggatcatcattgcagaatcaccgagctgttcgatttgatatcgtacagtcatctttctcacctcttttatttctcgttcatcaggatgacgagaggttacagcaccgcaagcgactcgtctcgaatatctgtgatgagcatatgccccggcgcatgtgtgatgaccatttcaggctttacattcatagccacggcttgcggggtcaccccgcatgcccaaaaaacaggaacctcgccgtcacgaatggaaacggcatctccgaaatccggtttcctgagatcgcgaatcccgattgctcccggattgccgatatgcatcggccctccgtgcacagccggaaaacgcgaggtcacttgtgcggcacgtacagccagccgttcaggaaccggcctcatgctgacaaccatctgtccgtgaaacgcccccgccggaacacaatcgatattcgttttatacatcgagacgtttgtcccctcatcaatatgccggacagctatcccattattgatcagtgcctgttcaaaggagaaactgcatccgatcagaaagccgacaaaatcgtcctcccagtatggcgtaatatcagatacttcttccgttaggataccgtgcctgtaaatacggtatttcggaaagtccgttctgatatcagcatcaggcgcagccagagacggcacaggcgaacctgcttcagtcacatccagcacggggcagggcttttgatttcgctggcaaaacagcagaaaatcaaaagctaggtcctttttcaaaaccacaagattcgcttgggcgtagccgccggacatgcctgcggtcggcccgtttattttcccctctcgtatcagggcgcgtacatccttcggcgccattttgtttaattgctccacttatatcagctccacaattgaggaagttgtgtacataacgtgtagattcccataactgccattacaatcactacaagcgcgcctgtgcttgtcagccaaagcggatgcttataatcaccgacaatgtttttcttgtaggcggcaacaagcagcgttccgagcgcaatcggcagaattaagccgttcagtgaaccgacaaggacgaggatcttcgcaggctggccgattgtgacaaaagctaacgtagaaaccacaataaatccgataataataccacgtgaattcttttcaatttttggagaaaaggtcttgaaaaatgaaacagatgtataggctgctccaataacagacgtaatcgccgcagaccacatgatcaatccgaaaattttataaccgacatttccagcagccagcttgaagacagaagccgccgggttgctttcatcgatgtgcaggcctttcgatacaacgcctagaaccgcaagaaaaagagcgatacgcatgacagatgtaattaaaatgccgacaaccgagctttttgtcacctgcggaatggattccttccctttaattccggcatcaagcaaacggtgtcctccggcaaatgtgatataaccgccgacggttccgcccactagggtgacaatggcaaatatgctgatgtgttccgggacgaatgtatttgcgactgcctgtccgaccggaggagctgtcgtcgccgcaacgtagaccgttaaaataatcatcacgaaccccgcgatttgcgtaaaacggtccatcgcttttcctgcttccttgatgacaaaaatcaaaatggcgataacggcactgattaaagcgcctgtttcaggtgtaatgccgaacagcacctgaagtcccagcccggcccctccgatattcccaatattaaaagctagtccgccaagcacgacgagaatggcgatgaaatatcccagtccgggaagcaccatattcgcaatttcctgacctcgttttccagaaactgcgatgatgcgccacacattggtttgggcgaaaatatctaaaataatagagattaagatgacaaaaccgaagcttgctgcgagtgtgtttgtgaatgttgcggtttgggtgaggaaacccggtccgattgctgatgtcgccattaaaaaggcggcgcccatcagcaatgaccagcttcccgctttttttcctgctgtctttttctgctgctccatctattgttcctcctttatgttgacttctgttctgaaatagctgtcacttcaatttcagccgctttgagctgttttctgattttttgcgcaaatgtcagcgcatgggctccatctccatgaatgcagactgtatctgcttttaatgacacatcatgtccttgctgagatttgaccgccccttctttcaccattttgatgacctgggtgacggcggcatcatcactttcaatgagtgcgtccggctgggagcgcggtgtcagcgtgccgtccgattggtatgttctgtcggcgaacacttcatttgcggtctgaagtccgatccgttctcccgcttttacaagctcactctcagcaagaccgaaaagaatcaggcctggatcaatcttatagacagctttcgcgatagcatccgacagtttttgatcgactgccgccatattgtataaagcgccatgcggcttgacgtgctgcatgtgaagtccctctgcttttagaaagccagagagcgcgccaatttgataaacgacaagatcatacgcttcctcaggagaaatcgccatattgcggcgcccaaaaccgagtaaatccggcaagcccggatgcgcaccgatttttacgcctttttccgctgcaagcgcgacggtttttcgcataacactaggatctcctgcatgaaatccgcatgcgatattcgctgatgtcacatactctaaaatatcttggtcaagacctatcttgtaggatccgaagctttctcctaaatcacagtttaaatcaatctgaaacacagaatccctcctgccaaagcaaacgatatgctttatgtcatttattgtcccgaaattcggaacgactattccgaatttttgaactttatttcattataagtgaatcatatcagtttgtgaaatacttttgtcagaaaacctaccatggtcccagaagaaaacctgccaaactaaaaaagagagtccatcttaggactctctttttttatagtacccaatggcgaatcgctttagcgacaccatcctcaatatttgtatccgtgatataatcagccgtttcttttacgatgtcttgcgcattgcccattgcgacgccaagacccgcttctttgatcatcgcaatgtcattaaggctgtcgcccatcgccatcacattctccattgtaatgccgagtttttccgtaaccttggcaagggctgcagctttgttgatgccaagcgcgttgacttcaatgtttgtcggacttgaatttgtgatttcgagctctttgttttttctcagctcctgaagcacttcgtttcggatatcgtcatcctcaatgtcaaagccgaatttgagccattcatgatccgtaatgttttccggaaactcgcctctccatactttattcaccgtagaagcccagaaattagtgttgtgcttattccgcaaatcccacatcatttgaatatggtccgtatgaagcagcttccgttccaccaaattaaaattcgaatcccaaatttcactgccgtttgccgtgattagaaaggatgacagctttagcgattccgccagctcccggcacgtcatcagcgtccggcccgtgctgatcaccacatacacacctttatcctccgcttcacgaatggctttgcggttttcatccgagatcagctgctcgtcgttcagcagtgtaccatccatatcaattgcgatcagcttgatatctacatcttctctttgaacagacatatatgtacctctctttatctttttgttgtgcttctctctattctaatacattatacccagcgggacaaaaaagcgatttcctatgtttgaggagaatggataagaggaaaacaaacggtgaggtgatcaaacatgacagaaaaaaaacagcaaaacaaaccaaatgaaaacccccagcacaacgacttaaccgatccgattcctaatgaagagctgaaggaaaatatgaatgatgaaaaacacaaacgccagcaaagagataactctcaaagcgaacgggattacgacacaaaatagaacccctcacaaaatgttgtgaagggtttttttcatttttcaatatagatgccgatttcagcttcagcaacaggctgctctccaactgatgccttggcatgtccgaacacaaacccgcgccgattgcgcgtgacttcaaacgtaagatcaagccggtcaccaggcacagcttctcccagcttttccgctttcttcaccgaagacaataatcccaagctgttctcatctgtaattcctgtaaaagccgcggtttgcgcaagcgcttcaatcacaagtgaaaacggcatttctgtttgcgtatcagtaataaaccaatcgttctcactaatcagcttataagctgccgcatgtttgccgggctcgctatccgtcacgccatcaataaacataaatggatagcggtgaggcaaaggtaatgagttcattttatatctccttttttgaccattatatctcagcctaaagtgaaacgataggatataatgggaaaaacacaaaaggaggccgttatgtccccaaaaccgcttgtcattctcgtacacgaaatatacggtgtaaacagccatatgaaaaagatgggccggctgatcaaaatggctggatatgatgtgttgacgcccaacctgctcggcgaggatgaagtctacacactgtaagaagaaaaaacggcatacgaacaatttacaaaacacgaacggctgaaaacgggagaaaccatcatccagaatgtgatcagacaaaacgccggacggcacatctttgtgattggattcagcgtgggggctactatcgcatggaaatgcagcagtatgcctgaggtgagcggatcggtttgttattacggttcccggatacgcgactctcttcatcacgtgccagcctgcccggtcctattgtttttccctaattatgagccgtcgtttgacgtaacgcttcttatcaaaaaactgcgggaaaaacagcatacccatcttgagatttatcaattcgatgcgcttcacggcttcgccaatcctgattctgtttatttcaacagggcccttttcttcaaaacgctctctatcataaaaaacggggcggaaaaacggctccgccctgtttcatcagaaattttttaatcgcttacagcgctttattatcgcgtgttttggttccgtacgttccatgttctttgttgcactgagttttattttgcctgtctcatctcaccgaatggataaaagacgagagattcagtaccgatgatatcgtcctcagaaggcatgcccattccgtttctgctatccagtgaattgagacggttatctcccatcacaaaatatttaccggtaggaacctcaacctcgaagtcacccgttaaggttacacccgactctttgacctcctgtttatattcctttaagtatggttcttccacctttttatcatttatgtatagctgatcatttttcattttaatgctgtcaccaggcaaaccgattaaacgtttgacaaatgagcggccgctctttttgtcatgaatgactatgatgtcgcctctgtgaaacccgccagtccatttgactgctttatcaaccagaattctttctgagtctttaagcgttggagccattgatgatccttcaataagaaaaggcttgtaaaacaccaatctgatcgtaaaaatgagagctgcgatcataatgatactgagtacaacgatcgttttgatttttctttttttctttaacgtgattgtttttgcattcaacttccttcacccgatgctttcctaagaattccaaattattatacagcatttggatctacttggttagactttcgtggaaattttcgtaaggaaatggacaggcccgggcagccatctgccccggcctgattcatcagagctttcttaagcgcgaacagatttcatcagtgacctcagccgttgtgctttgtcccccaatgtcgcgtgttttgatgccgtcggcagtcacttgctccattacatccagaattttcgcccccagctcttcctctccgaagtggtcgagcatcagcttcgctgtccaaatctggccgatcggattggcaaggccctgtccggcaatgtcaggagctgagccgtgaaccggttcaaacatggacggatatttgccggatggattgatgttcgcagaaggcgcaatgccgatgcttcccatcaggcttgagctgatgtcggttaaaatatcaccgaacaagttgctcgccacaatgacatcaaacgtttccggacgcgtcacaaaaaaagcggccagcgcatcaatatgctgagatgatgtttcgattccgctataatcagcggctgtctgctgaaagacttcatcccaaaacggcatcgcatgataaatgccgttagactttgtggcgcttgtcacatggctgcgccgttttttcgccaattcgaaggcaaagcgcatgacacgttctgtcgcttttctcgtaaacacggcattctggatggcgatttcatcatcgcctctgtgaatgcgcccgccgacttcactgtattcaccttcactgttctcgcgaatcaccacgaagtcaaaatcatttggatgcagaagcggcgacgtaatgcctgccatttgtttggcgggtctcatattaatggaaagctcaagctccctccggattttcagcagcagtccccataacgatatatgatcgggaaccagcttcggatttccgacggctcccaaaaaaaccgcttcaaattgagtaagcgtatgtattccatcttcgggcatcattttgccgtgctccaagtaataatcacagctccatggaaaagccgtgaatgagaatgacaaacctccgtgtacctcagccgctgtatgaagcactttctcagcagccgctacaacctcttttcctacaccgtctcccggtattgccgcaatctcgaattgtttcattgtcattctccttcccctgttttcgtaagcgctttctattatactagattgcgagatagtaaaaaaagcccgtgacattgtgtcacgggtgatcggttattgattaagtttctttaaaatgatggcgtgcaacggttcatgggactgaatgccgcactcctcttgaagtacgccgctgtatcctttttcttcgatcagcgcttgcagttcaaccgcttcagggtcaccggtgaaatcgaagcgcagtgctgcggcaattccttccgccagtgcattcggttcttttattttctttgccgggcctacaagcctatcattttctcccagttttctgagaggtgacctcgctacgcgggtcacatcgtccgaaatgaaaggattttcaaagcgaccgatgatttttttgatatattgttcgtgttcagtttgcttaaagccatacgatttgacgagatagtcaccagtttcaagcagcgccgaatgaacgacacggcggatttccggatgatcgattgcttctttgaccgtcttgagtccgcgctgatagccgacatacgctgtcaccgcgtgtccggtattgaccgtaaacagcttccgttcgatgtacggcgttaaatcatcaacaaacagtgcgccgtttatgactggtgttttccctttaaagcctgattcatcaatgacccattcgaaaaatggttcaaccgatactttcagcgggtcttcatgatgctgaatcgggacgatccggtcaacggcagaattcggaaaacctaccgtttcactgacggatttctgctctgcttccgttaaatggctgtatatctctttctttaagaagctgcttccgccaatcatattttcgcaggcaatgatattcagtgtgtttgcagtatttcttcgtcttaaaccttctgcgatagacggggcaatcagcttcagcacattcgggccgacagctgttgtgatgagcgccgcctcattcatcagccggtacagctcctcggtctgactgccgctgttaatagcgctcaccgggccaatgatctccgatgaacgtccctcttccgccagttccactgtgtattcttttttttcattgaggaggctgaccatcgtttcgttcacatccgcaaacaccacatcatagccggagtggtgaagcagcgcgccgataaatcctctcccgatatttcccgcaccgaaatgtaaggcgatcatgtcagttcacctcgttgaaaatggcgatcaaatcttcttcgcttttagcggagatcaggcgttcaatgttttcttcttctgaacagataatggcgatgttagacaaaatgtctaaatgctcattatttttacccgcaatgccgaataccacttttgccgtgttgccttctccgtactcaacgccctctggaatctgtatgattgaaattcctgagtgaagcacctcgcttttcgcttcttctgtgccgtgtggaatggcaatgaaattccccataaacgtagaagacgtttcttcacgttcaaacattttgctaatgtaatcctctgtcacgtagccgttgtcaatcagcgtctggcctgccaatttgatagcctcttcttttgatgataccgtttgattgagtttaatgttttcctttgcgagtacttgcatgacaatcactctctttctataagattactttttcagcttttcaatcagctcgtcgtatttcgggctgtttaagaagttatccactgatatgtgcgtcgcgttcggcagctttgctttcgcgcggtctgttaaatctttgtgggtgatgacaatatccgcatcgcttggcagattgttaatggccgtgttggtcacactgatgtcaagctccgcttttttcactttgtttcttaagatggatgcccccatggcacttgatcccattcccgcatcacacgcaaagataattttgttcacgctttcaggagacagctcagacgcttcttctgctttggcttgttccgcctctaaagcagctgctgcttggcttttcttccccttcatggactgcattttttctgttgcggcagccaggtcttcttcactagctttagaggatttcaggatcactgctgaaacgatgaacgatacagctgcagcgaccaatacacccgccaatacgccgaaatagtctcctcttggcgtcattgccatcaatgcgataatgcttcccggtgacgctgccgcgacaagtccggcattaaagatcgtaaatgttaagagtccgcttgctccgccggcaatggctgcgagaatcagggccggtttcatcagaatgtacgggaagtaaatctcgtgaatccctccgaagaaatggatgatcgccgcaccgggagccgttgattttgaagatcctttgccaaagaacatgtaggccagcaaaatgccgagccccggtccagggtttgcttctactaaaaacagaattgattttcctgtttgagatgcttgctcgattccgatcgggcttaagattccatggtttatggcgttgttaaggaacaacactttcgccggttctacaaaaacactggctaccggcagtaaattagcgtgtacaatgacttccacaccagccgccagcaatttatttagcgtcaagacaaccgggccgatggcgtaaaacgcgagaatcgttaaagccgcgccgacaatccctgccgtaaagttgttgatcagcatttcaaagccttgcttgactttatccttgaataatttatcagtctgtttaatgaggtatccgccaagcggacccataatcattgcgcctaaaaacattggaatatccgatcctacaatcaccccaattgccgctgtcgctccgacaactccgccgcggtggtcgtagatcatttttccgcctgtatacgctatcaaaagcggcaataaatacgtaatcatcgggctgaccagcgtgttcagctgttcattcggaaaccatcctgccggaataaacagcgcggtaatgataccccacgcgataaacgcgccgatattcggcatgatcattccgctcaaataactcccaaagcgttgcactttcactttcatgccgccttgctgctgttcttgctgctgcatatataaaccctccctgttttgtttgtcgctgtaagatacaaaaatatgttcagagaatgatgcttccctttgactctatgttaaaacgcttacagtccctatacaattgaaagtaaagaggactttggcacatgactgtgacaattttttaaaaataaaaaggctcctggtttcaggagccttttctctttcctctataaatgatgttgccattttgaatcacgtactttgcaatcatccgctcactcacaataaaaacgggatacgcgcacacaagcgcaaatacagccatcggcacgtgctgtacagctggcagcactgagcctgccgcattgcggaggagcatcaaaagataaataagcagcacgatggccgctaatgataccagcataatcggagctgaaactttatattcataaagccgttcccggcagtggccgcagcgaaattgacaaggcacatttgatgatctgaccatatcgcctgtcaaaggtttgccgcagttcgggcatggtgtttctttcatagggtattcctcactttctattccatctgtctattataccagagtcccttctgtttcgttttgttgctgttcaacacattttcacattttttatcatccacttacttgtctccgtctctaaaatcctctacgcttaaatagatcttaatgaagagggtgtatgaatgcttccgattaatagacagcaacacatactgaagtggctgaaagaagaaggctcgcttagaatttctgacatcagcgcaaggttcggcgtttcggaaatgacggtatatagagatgtcaatcagctggttcagtcaaatcaggtcattaaaacggccggcggcatcacgctccccgtccgaacacctcaaacagatcatatgtgcagctattgcttgaagcccgtcaatcaagctcattcggttcagctgattacggtaaaccaagacattgaacagctatgctgcgcacattgcgcgtttttgcgttacgcggataaaacggaagaggtttcacacttgatttgcagagattttctgttacagacaaccgtcagtgccggttcggcttatttcgtcgtaaatgctgaattaaacctgcactgctgccagccgcaggccattccgtttgcgacacttgaccatgccgaacgatttcaaaaaggattcggcggagccgtccgcactttcgaccaagcgctggaagacatgcttcaagaccgaaagaaacgctgcacctgcaccaagaaataacacaacacatacagcggaaggtggtgtctgagtgatgaagcgaaacagatggtggatcatccttctgctttttcttgttttcctgccgaaaacaagctttgctcacgcctatattgtcaaatcttcacctggggaaaacagcgaattaaaaagcgcccctgcgcaggtggaaatcgaatttaatgaaccggttgaagaagggtttcattacattaaagtctataattcaaacggcgaccgtgtggatacggacaagactgaaatcaaaaaagataatcatcacatcatgacagtgaagctgaagaagaatctgcctaaagatgtgtacagagcggaatggaatgccgtatccgcggatggacatcctgtttccggcgtcattccgttcagtatcgggaaagcggatggcggattcagcagccaaaaagcagccgattcagcgctgaatccgggaacagcagcagatcgcgcgattctgtatacagccttatctctgtttatcggaacggttttcttccatcttttctggtataaagggaaatcagaacagctcgtcaaacggacgagacgtatcctgaccggctcgatcgcagcattggggctggcgcttttgcttcagcttccgattcagacaaaagcgaacgcaggcggcggctggggcagcgcattccagccgggctacatcagagaaacactgtttgagacagcaggcggctccatttggatcatacaggccgcgctgttcgtgctgctcgcactgtctgtcatccctgcgatacggaaaaaccgcttttcatcctttggctattggacagcgccgctcattttctttttcggtctcctgctcgccaaggcgtttaccgggcatgctgctgtcgttgaagaaaaaacggtcggcattttgatggatttccttcatttaacttccgcttccatctgggttggcggaatagcggcactcgttttgctgctctcaaaagaatggaggcagcctgacaaaacgctcgcgtgggagacggtcagacggttctccccatgggcgctcactgcagtcggcgtcattttgttttcaggcttgctcaatggatttttcatcattcgttcaatggattcactgttccatacagcgtacggccaagctcttttagtgaaaagcgggctgtttgttttcatgctggtcttaggtgcgattcattttctgcttaccagaaagcagcgccgcacaggaatcagccgaacgttgaaagcagagtgggcaatcggcatcgctgtattgatcacagcggccgtgtttacaagcctgccaagcccgcctgagccggcgccggaaccgttctaccaaaccaaagcgattgaaaacggacaaagcgtttctctcagcatcagcccaaaccagcccggaaaaaatgtttttgagctgcgggtcaccgaccataacggagatcccgtgaaaaatatccagcaaatcacgttaaccgtttataaaacaggcctgtcaggcagcgaaaacaaaagcacctttacattaaaagaaaaaacaaaaggcgtcttccaagatcaaaacctgtcgattaatgaaaaaggaaactggaagatcaaagtccacggcctgaccggcgactttaacgaaatcaatatcatgtttacaaaatccaattaaggagtgtttacgttgttgaaaaaaatcgcattgacactatgtccggctattgtcggctccctcttattctttacggcccctgccagcgcgcatgtttctgtaaaaccggctcagtctgctgctggctcttgggaaacgtatacaatgaaggttccttcagagaaaaatctgccgacaacgaaggtagtcctcaaaatgccgaaggatgttgaattccagcaatatgagccaattccgggctggaaggtttccactcaaaaacatgatgacaaatcagtatccgtgacatgggaggcgactgacggaggcattcaggaaggccagttccagcagtttacctttgttgccaaaaaccctgacaaagcggaggaagctgcttgggacgcataccaatattacaaagacggcagcattgttgagtggacaggtgacgaggatgccgatacacctcattccattacaaacatcacgtctgcaaagcaagtgacagatgagcacggcgccacgaaaacagaagacgattccgaaaactcaggttcttcagctctagacattacagcgatggtgctgtctgcggctgccattattttatctgtagcagcacttgtaaagaaaaagcgtgcctaataaagaaagcgatccagatgtcatgtctgggtcgctttttatgtttaaccgcggcctgcctggaatgaaggatattgtgtcataccgccgtccgcgaataacgtgatgcctgtgacgtagctggcttccttcgaagcaagccaggctgctactgcggcgatctcctccggttcgccgatatatcccattggaatcatgctttctacatcagctttctgtttagggtcagcgaatttttcagcattgattggcgtgttgatcgcacctggcccaatattattgacgcgaatgcccttcggcgcgtattccaacgctaatgtttctgtcatcagctttatcccgcctttacttgccgcatagtggacaaataacggccaaggaatcacttcgtgcacactggacatgttaatgacatttcccttgatatcgttttctacgaaatatttaatcgcttcacggcttcctaaaaaggcacccgttaagttcgtgccgatgactttatcccaatccttgagcggcatttcgtgagatggtacaggattttcaagaccggcattattaatcataatatcgagtgtgccgaactctttaattgccgtttgcacgatattttttacatcttcctctttcgtgacatctccttggacgacaacagcttcaccgcccgccttgatgacctcttcttttacctcgttcggatcttgtttattactataatagttgataaccacttttgcctgctccttgccgaagcgaatggccattgcctttccgagccctgaagcagctcctgtaatagcgacgacttttccttttaaatccggatacatatacatcctcctccatttgttatgaatttgttttggcgattcctaagaatacggcggcggcaattatcaggataatcccgatcgcaattgctattagctggcgtttcgttttcttttcacgcaggatgaaaataccgccgagcgtagaaatgacaattcccatttgtgaaagggaaaagctcgttgcaacgccgactcgcggctgagaaataaacaaaaacatatttccgcctgcccagattaaccctgggagaatatttctgatcgcatacttgttaaagggtttgtgtctataggttaaaactaaccccccgaccaccatgccaattgcctgtggcagcagcgcggaccagccggacacattgaataatctagccacgactacataaaccaaataaccaagagtcgaaacaaggagaatcaaaatgccctttttcaaattgcttggctcgccctcttttttatcattcttatcttccaaggatgtgagaatgattcccacaatgataaagatcaaagcgagaacgccaagcgtaatcgcaatcggtgttgaccattcgcggaacacgatcacaccgaaaagcgaggtggaaacgagctgcattcctgtggaaatcggcattgttttcgacacgcccatcaattgaatgcttttcagctggttggcctgtccaagtgaccaaaataagccggatacgattccaacaataaaaatgcgaagtgacagaacgggctgaacaaaaaagtaaataacgatagaaacaatgagtgccccgatcgtcgttcccagtgtctggctgtacggcccgccgcctaatttcacattgaagagaacaatgctcccccaaaacaaagccgggagaagagccaataataaatccattgttggggaaccttctttcaaaatgtatttgctgttattttggctggaattgttgtgattattcgccggaacacaaaaagagctgccggaaaatccggcagctctcaggagcgtgcattctttataaaccgatggacaaatattttgtttcaaggtacggctcgataccttctgaaccgccttcacggccaatgccgctttctttcattccgccgaatggcgcttgaaccgctgacggtccgccgtcattccagccgataatgccatactctagattctcggaaatatagatgccgcggcggtagttttctgtgaagaagtaagcagccaagccatacggtgtatcgttggcaagctgaatcgcttcatcaatatcagaaaacgtgacgatcggggcgaccgggccgaatgtttcctcatgcatgatgttcatggacgtatcgacatcggtgagcactgtcggattcacaaagtagcaccctttgtcatcgtttcggtcatatgtgcccccagcaataaccttcgcgcctttttcaaccgcatcatctaattggctgacgattttttcgaagcctcgtttgttgatgatcggtccgacattgacgccttcctcaagtccatttccgactttcagcttagacacttgctcgctcagtttcgcagcaaattcatctttaatggattcatgaacgatcaggcggttggcgcatacgcaggtttggccggcgtttcggtatttggacgccatcgcctgttcaacggcaaggtcaatgtctgcatcttcatctacgatcagcggggcgtgtccgccgagttccattgagacgtgcttcacggtgtccgcgctgtttttcataaggattttccctacaggtgttgagcctgtgaacgtgattttgcggattttcggactgcttgtgaacacatttccgatttcttctccatcgccgattacaacctgaagaacatccttcggaatgcccgcttcatatgcgaggcgcgctagttcataagcagacagcggtgtgtccggcgccggcttgatgataaatgtacagccagcggcaagagcaggcgccgctttgcgcgtaatcatcgcattcgggaaattccagggcgtgatagcagcaacggggccgaccggctggcgtgtgacaacaattcgtttacccgttgtcggggccgggaccgttcttccgtacacacgcttcgcttcctctgcgaaccattcgatatagcctgcgccgtaaagtacctcgccgactgcttcttggtatggttttccgttttcctttgtaattaaatctgcaagttcttctttatgttcaacaatcagctcataccattttttcaaaagagacgctctttcgttcgctgatgttttagaccacgttttaaacgcttgatgtgaacgttcaatggcttcttctacttctttggctgattgctgaggaatcgttttgatctcctcgcccgtagccgggttgtagaccgttaattgatctggcatattgaacattcctttcttttcatgattacttaaaatgatagcagacccagccgttttctttccaatgattaagctcgcaggcccgcctccaagatgctgagcccttcatttaataggctgtctgagatgacgagcggtgtcaaaaagcggatgatattaccgttaattcccgctgtcagcaaaagtaatccgttttgattcgcataggccgcgatcgctgctgcttttgccttatcaggctcacgcgtgtcaggatccttgacgatttcgattgcggccatcgccccgagtctgcggatgtcaccgatgaacgggaattcttgtttccactcatacgccttgtcttcaatgattttgccaatttcttcagaacgctcattcagtccttcttcttcgataatatccaagactgccaaagccgccgcgcagccgagcgggctgccggcatacgtgccgcccagctcccctggcgctgccgcatcaagcatttccgcacgcccaatcacaccgcttaatggcaggcctgccgcaagcgatttagaaaccgtgatcagatcgggcactacatcaaagtgctcaattgcgaaataagtgccagttctggcaaagccggtttggatttcatcagcaacaaaaacaataccgtgttctttgcagaatgaagcgacgtgctgtacgaaccgtttcgaaggaataataaatccgccttctccctgcactggctccatcacgacacacgccaccgtttcaggcgccactgaagcgataaagaaatcattgaatgcttgaatgaccatatcgtcatagctttcatcactcatgccggccggcttctgataataataagggaacggagcttgataaacctctggcgcaaaaggcccgaaaccgaatttataaggttttaccttgcttgtcatgctcatcgtcatattcgtgcgtccatgaaacccgcgcgtaaatgagacaacgccttgacgctttgtatactttctggcgattttcacagcgttttcgactgcttccgcccctgagttaagaaaaatcgcttttttctcatggctgcccggtgcaatgccacacagtttttcggctaactcgatataagtcgggtacatcatgacattaaagccaggatgaatcagctcctctgcctgccgcttcacagcctcaaccaccttcggatgcgagtgtccgacatttaacgtgccgatggcgcctgcaaaatcaataaacctccggccatccagatcgtacagctcggccccttctcctttgaccgccagactgcggttgccgttgctcacaccttttgacacaaattgatcccgtttttgctgccattgtgcagttgtgatgcttactgttgtttgactcatgtgaatatccccctgtcggtattttcttatcattctgacttctctttggtatgatgaaaagtaccaattataactttttgatggtatcagaaggagaaactacaaaatggatatcacaattacactcgatcgttcagagcaagccgattatatctatcagcaaatttatcaaaagctgaaaaaagaaatcctcagccgcaatctgctgccgcactcgaaggttccctccaagcgggagctggctgaaaatctcaaggtcagcgtaaattcagtgaattcagcctatcagcagctgctggctgaagggtatttgtacgccattgaacgaaagggtttcttcgtggaggaactagacatgttttccgccgaggagcaccctccatttgcactgccggatgatctaaaagagattcacatcgaccagagcgattggatatcgttttcacacatgagttccgatacagaccattttccgatcaaaagctggttccgctgcgagcaaaaagcggcctcccgctcataccgcacgctcggcgatatgtcacatccgcaagggatatatgaagtgagagcggccattaccaggctcatttccctgacgaggggtgtaaaatgcaggccagaacaaatgatcataggggcaggcacacaggtgctcatgcagctgttgactgagcttttacccaaggaagccgtgtatgcaatggaggagcctggctacaggcgcatgtatcagcttttgaagaatgccggaaaacaagtaaagacgatcatgctggatgaaaagggcatgtcgattgctgaaatcaccagacagcagccagatgtgctggtgaccaccccgtcgcatcagtttccgtccggaacgattatgcctgtatccagaagaattcagctgctgaactgggcagccgaggagccgcgccgatatatcattgaggacgattatgatagtgaattcacatatgatgtagacagtattccggcgctgcaaagcctcgaccgttttcaaaatgtcatctatatgggaaccttttcaaagtcccttctccccggcttgcggatcagctatatggtgttgccgcctgagctgttgagggcatacaaacagcggggctatgatctgcagacttgctcatcactcacacagctcaccctgcaggaatttatcgagtctggtgaatatcagaagcatataaaaaaaatgaagcagcattataaagaaaagagagaacgcctgatcaccgctttagaagcagagttcagcggagaggttaccgtaaaaggggcaaatgcggggctgcattttgttaccgaatttgataccaggcgcaccgaacaagacatcctgtcacattctgccgggctgcagcttgaaatattcggaatgagccgatttaacttgaaggaaaacaagcggcaaacgggcaggccagctctcattatcggctttgcacggctgaaggaagaagatattcaggagggtgtgcagcggcttttcaaagcggtttacggacataaaaaaatccccgttacaggggattgattcaccagcggtcctggtctacattcagcacggcttcaagcaggcccggaaatgccttttcaaggtcttcagcgcgaagcgaataataccggcgctttccttctatccgaacttgagcgatgcctgattctctcaaaactttaaaatgatgcgataaagtcgatttggcaacctgcacatctgcacaggtgctgcacgttttttcttttgcttcagctaattgcttgacgagctctaaacgaagcggatcactaagtgcatgaagaacctttgtcagctgcaatgtttctgtttctggatggtttggaatgttcatgacacaaatgtatcacacaacaattagaatgacaattttactatttaagggtttttcctttacctcaattagaatacatgttacatttagttcgatgaaattcgaacaataaattcgcataacaacggaggagatttaaatgatcgtattacaagcttacatcaaagtaaaaccagaaaaacgcgaggaatttttgagcgaggctcaatcacttgttcagcattcaagagctgaggaaggcaacgtgcaatacgacctatttgaaaaagtaggcgaagaaaatacatttgtcatgcttgaaaaatggaaagatgaagcggcaatgaaattccataacgaaactgcgcatttccaagggtttgtcgcaaaaggaaaagaactgctgagcgcccctcttgatgttgtccgcacagagcttagcgagtaaagaaagggtgtcccatatgaatgaagtgattaaatctttaacagaccaccgctcgattcgcagctacacagatgagcctgtagctcaggagcaattggaccaaatcattgaagcggtgcaatcagccccttcttctatcaacggacagcaagtgactgtgatcacagtccaggataaagagcgcaaaaagaaaatctccgagctggcaggcggccagccatggatcgatcaagctcctgttttcctgctgttctgcgcagatttcaatcgggccaaaattgcgcttgaagatctgcatgatttcaaaatggaaatcacaaatggattggaatctgttcttgtcggcgcagtagacgctggtattgccctcggcacagcaacagcagcggctgagtcactcggacttggcacagttccgatcggtgcggttcgcggaaaccctcaagagctgatcgaactgcttgagcttccaaaatacgtgttccctttatccggccttgtcattgggcatcctgccgaccgttcagcgaaaaaaccgcgcttgccgcaggaagctgtcaatcatcaggaaacttatttgaatcaggatgagctgacgtctcacattcaggcatacgacgaacagatgtctgaatacatgaataaacggacaaacggaaaagaaacaagaaattggtcacagagcatcgcttcctactatgagcgcctgtactatccgcacatccgtgaaatgcttgaaaaacaaggatttaaagttgaaaaataagctcttattcggcctgtcggattttccggcaggcctttcatttacccggttaaaatccattgacttctattttgtttatttggtaaaattttttcatagttactcattggttttctgtgaaccaatgggttttctaatgttcaagaaagaaggaagccatgagatgcttgataaaaaaacagatatcttgttagccgcgcgaaagcttttttcggaaaaggattttacgtcggtttccatgcaggcgatcgcagaagaatgtaagatgtcaaaagcttcgatatataagctgttccaatctaaagaagatctgcttttggagctgctgtcatttaaccagaagcaaatggtggccgcggcctcaagacttcaggaaaataccgcacttacaccggaggagcgtttgacgcaaaaggtcaaaatggaactggagggcttcaggcggaatcagcagtttttcaatatgctgacctacggaaaccctaagctgcacaatgaccgggtcaaacagcatatccatcagaccagatcgacgattatctgctggcaccgcgattcgctgatccaggcgtatggagaaaccattctcccgtttgtgtgggatttggtcatcattcttcacggtatgatgcgtgagtttttaatgctgatcaaaatcgaggaaaaaccgcttgagcttgacccgatcgcagagtttatcatcagcaccctcaatcagattatcaaaaacagggaaacccgccagtctcttcttccgcccgaagccatcgagctttatattcattcagcatcctcctacaagccaaaggataaatcagtcctattatcggaaagcctgaaggaattacataaaggcatctcttccctgtccgccgcggactatgacgtagatgaactgacatccgcagccgctatgctggaggaagaagcgaagaaggaagaaccccgcgcttttttactcaaatcactgattggctatctggaacaaaccggtgttttaacacagcccgtttccatgttaaaaacactgttaattacttagagaaaagaagggatatgtattgaacacaagtattgaacaaaaaccttttaaccgttctgtcattgtcggcattttgttagccggagcgtttgtggcgattttgaaccagacattgttgattaccgcacttccccatatcatgagggatttcaatgtcgatgccaaccaagcacaatggctgaccacatcatttatgttaaccaacgggattttaattccgattaccgcgtttttaattgagaaattcacaagccgggcgctgctcatcacagcaatgagcattttcactgccggaacagtcgtcggagcgttcgcgccgaacttcccggttctgctgacagcgcgtatcattcaagcggctggagccggcattatgatgccgctcatgcagactgtattcctgacaatctttccgattgaaaagcgcggccaggctatgggtatggtcggattggtcatctcattcgcgcctgcgatcggaccgactctttccggatgggctgtcgaagctttctcttggagatcattgttttatattattcttccgtttgctgtgattgatttgattcttgccagcatcctgatgaaaaacgtgacgactttaagaaaaacacagattgatattttatcagtcatcctttcaacatttgggttcggcggccttctgtacggcttctcaagcgtcggctcttacggctggtccagttcaaccgtcttgatttcactgctggtgggtgtcatcgcgctgctcttgtttatcacaagacaaatgaagcttgaaaaaccgatgctggaattccgcgtcttcacgtttggcgttttcagcttaacaacactgctgggaaccctcgtctttgcattattgatcggtacggaaaccatcctgccgctttatacacaaaatgtcagagacgtcacagcttttgatacagggcttatgctccttccgggagccgttgtgatgggctttatgtcgccgattatcggcagaatttttgaccgtgtcggcggaagagggctggcgattgccggtttctgcatcatcttcctgacatctctgccgtttatgcagctgactgaccatacgtcactcgcttggattgtcgttttatacaccgttcgtctcttaggcaccgccatgatcatgatgccggtgacaacagccggaatcaacgcgctgccgcgccacttgattccgcacggaactgcgatgaacaacacgattcgccaagtcggcggctcgatcggaaccgcactattggtttccgtgatgagcaaccaggccgcacatgcaggcacgacaaatgtgaagcacgctgccctgcacggcatgaacgccgcttttattgtggctgccgtcattgcacttgtcggcttccttctctcattcacattaaagaaacctcagcgccctgccgaacagcagccggcacgctaaaaacagccctgttcagggctgtttttatataattatttaaaaatccttataataccttagattcttgcataagagcatcaaaataaatataacctgcagtttgagcagctttaattttgttatctaataaatcacaaaaagttattctaccttctgtaacatacataagatctgttccatcaatcagtatagttttaattgatttacccgaaacaaggctctttacggaatctatcgagaatccattcactgatataaataggccccttccatacatttttccttcaaccttatgggcaaagtggtacatgtcaatagaggctgtggcagcatcattccacttcccttctaataaataatgttctccatcatacttgatagctccgtcaatttgttcaccttttatcttaaatggctcagtaacatcaaactcttctcgttgggctatcttcattattaaattctcaaaatgataccctcttttttgactactaattatacgcccgttactatctttacttattaataagctcatatattcattatgtatttcttctaacaatatagttttttttgaaatagagctttgttctattttattctttttttgctgctttaacttatgagtataatctttataaataatgttaagcttatttatataagactctgctttacttctatccaatttatttagttcttcaaaataatatggatcaaaatagtcccattgacttaatgtctcaagcatattacgtagatgtattattcccttatctggtgttgcaaataaattacgaaaaacactatccactatttggtatctcttcatatcaactagttcattttttagaggcatatgacgacgagggcaaccactatttctaaaaaaatcataaagatctgatttactccaaaataattctaaaatacaatctttcatatgtgaaataactgaaggagaaaattctagactcataaggaacactccttgaaactaataaattaatgaatatgattaaccttaattatccatctatataaaaacaaagtaaagtttatttctacacttaacagtaaaatatctatagtaccagttaaaaacacacttcattactatcaaaataagtcttagatattttttagaaaaacataacaaaacccgatcttagactgaattaacagattctatagatcgggttcttattttacttctctaaaccgtctttcacttctttgatcatttgtgccatagactcaagaccgcctcctgataagtaccaagtagcagaatcaaggtagacgacatgatcatttttcactgcgtttacatttttcacataatcattttcaacgacttgtttagtagatgatgtttcaccgatcgctgtaccgcggtcaatgacaaacaggtaatccgggtttgtttttgaaatgtactcgtaagaaacgctttgtccgtgagtagacgctttgatgtttttatcagccggtgtcacgccgaacacgtcatggatcaggccgtatcttgatttaggaccgaatgcgctgatcttcccgtcgttcgccatgatgacgagaccgtttttgttaagcttttcagccgttttctttacatctgcgattgaatgatcgatttttgcgagttcatccttcacttcatcttctttatcgaagatcttaccgattgtttctgcgtcagacttaaatgattccatatacttcgctgtgtctacgccaaggtaaattgtcggcgcaattttagagaattctttgtaagactcagattgtcttcctgagataatgatcaagtcagggtctaaatctgccactttctcgaagtctggctcttttaagcttccgacgtcagcatatttgtcatccttgaatttggacagatatttaggaagggcttgcttcggcagtcccgctactttatcatcaagaccaagtttatctagtgtatctaagcttccaaagtcaaatacgacaacttttttagggctcttcggtacttttgttccgtttttgtccagctggtgtttcaccgtaatttggtcttccttagaatcagaacctttgctgcttgtgctttggtttccgcatgcagaaatcacaactgccgtcaccaaagcgatgaatagtaatgcgaactttttcatgctcttcacctcttctatatattaagaaaaatagacacctattctttgattatcaatcgtctgaatcgggatggtcatatcgtagatttcctcaagcaccgatgtttctatcatttcttcaggcggtccttcttttacgatgcggccgtttttcaaagcgacgatatagtcagaatagactgaagcaaaattgatatcgtgaatgacgatgacgatcgtttttccaagctcctctaccagccgtttcagcagtttcataatttcaactgagtgtttcatatccagattgttcagcggctcatccagaaagatataatctgtgtcctgggcaatgaccatggcgataaatgccctttggcactgtccgccgctcagctgatccaagtatttgtcttgaatgtcttccagcttcatatagctgagcgcctggttgatatgaacccagtcttcctctgtcagccggccctgtgagtacggaaacctgccaaaactaacgaggtctttgatcgtgagcctgatattgatttggttcgcctgcttcaaaatgctcattttcttggcaagctctttactgtcacatgctccaatctcttgtccgtctatgtaaatctcgccggaatcctttttgatcaggcggctcatgatagacagcagcgtacttttgccggcgccgttaggaccgataaacgaggtgattttgcccttttgaatcgtgactgacgtctcttcaagaacaactttcccgccatattgtttgcttacatttctgacctctaccatgatttattctcctttaacagcaagtagataaaataaatcccgccggcaaaattaataatgacgctcagcgtcgttgagaaggtaaacactttctcaaccacaaactgccctccgaccagcgcaatgatgctgatgaaaacggagcctgcgattaagtatgaatgcttatatgttttcaggaattctctcgccaggttgacgaccagaaggcctaaaaacataatcggcccgactagcgctgttgaaacagaaaccaaaatcgcaaccacgatcagcatctgcttcaccactttgtcgtagtcaatgcccaaattcacggcgtgctcgcgtccgagcgacagcacatcgaaaaattttgtaaaacgccagacataaacgcctgtcagcaggaagatgatgaacgcgagccataacaaatccgtattgatattgttaaagctggcaaacatcttgtcctgcacaacttggaactcgttcggatcaatcagcatctgcataaaagaagacaggctgctgaacagcgtgccaaacacgattccgataagcagaaggaaaaagatatttctcccctcacccttgaacatgatctgatacaaaacaagagaaaacaggatcatcagcagaacagagatgataaagttgatgtttttattcatgatgaccatattcgcagaaccgaacaaaaagataatgccagtctgaatcagcatgtagagagaatcaaggcccaaaatgctcggcgtcaggatgcggttgttcgtaatcgtttgaaagatcatggtcgaaaacgcaatcgctccccccgtcagcacaatggcagcgacttttttgattcgtctcggcagggtgtaatcccaattgcctaagtcataaaacaaaaacaagccaatacatacaatggctaaaccaacgagcaaagctattttcatctggttacgcataggcttttctccttaacagcataaacaggaaaatgccgctgccgatgattccgaccatcaggccaatcgagatttcataagggaagataatgattctgcccagtatatcgcaaaacagcacaaaaactgctcccaacagcgcagtatgcggcaggctgctcttcagattgtctcctctgtaaatcgatacaatattcgggatgattaaaccgagaaacggcagcataccgacagtcaaaatgacaagagacgtgatcagggacacgataatgagcccgatgttcacaacccgtttatacttgaggccgaggttgacagaaaagctttcacccataccggccaatgtgaatttatccgcatacacataggcaatgatgacgagcggaatactcagataaagaagctcgtatcttcctttcacgactaaagagaagtctccctgcagccatgatgacacattctggatcaagtcatatttatatgcgataaatgtcgcgattgaactgacgatattcccgagcattaaaccgacaagcggaataaagatggtgtcgttaaacttgattctttcaaggattttcataaacagaaaatttcctgcaagggcaaagacaaacgcgaccagcattttgattaaaggactggcggatgtaaacagcagcaaggaaattaaaatgccgagcctcgcccaatccatcgtgcccgccgtcgtcggtgacacgaatttatttctgctgatctgctgcataatcaaaccgcagatgctcatgcttaatcccgcaatgacaatgctgatcaatcgcggcaaacggcttgcaaacagcgttgacgcctcttgtttgcttaaatcgaagagatcaagcggcgacagatcttctacaccgataaatacagatgtgactgctaatatgataagtagaataaataagtaacgtagcttcatgctgcctccttacatccttacagcaaaaagaacgtatctcctactccgcaaggactcaaaacaatatggccatatagtaattgattatcattatcatttacatattaccatttttctagggttagtcaatattctttaaaaatattaacctagtcatttatcaattttactaatcattctaaccattttccatcccaaaacgttaggctgtttaccatatttatctttataacgcaggtatacggtcagcaaacctgacattattcctcgtgaaaaatacaaatgttctctccagaaagaaattaccccttgatttacagtactgaaagagagataataaatactaaatttgtgtgaaaattttaaacattaggagatgtaaacatgaaggtcgttaaattcggaggcagctcacttgcttcaggcgcccagcttgacaaggtgtttcacatcgttacctcagatccggcacggaaagctgtagtcgtttcagctccgggaaaacgctatgccgaggatacaaaagtgactgatctcttaatcgcatgtgcagaacaatatttggcaacaggcagcgcacctgaactggcggaagctgttgtggaacggtacgctctcatcgccagtgagcttcagctggggcaaagcattatcgaaaaaatcagagatgatctgtttacgcttttagaaggagataaaagcaatcccgagcaatatcttgacgcagtcaaggccagcggagaggataacaatgccaagctgatcgccgcttacttccgctataaaggcgtcaaagcggaatatgtaaacccgaaggatgtcggcctctttgtgacaaatgaacccggcaacgcgcaagttcttcctgaatcctatcaaaacctctatcgtcttcgggaacgtgacggactcatcatttttcccggttttttcggattcagcaaggatggcgatgtgatcacattctcacggagcggttctgatattaccggttcgattcttgccaacggactacaagccgatttgtacgaaaactttacagacgtagacgctgtgtattctgtcaatccgtccttcgttgagaatccaaaggaaatcagcgagctgacatatagagagatgcgggagctgtcctacgcgggtttttcagtgtttcatgatgaagcgctcattccggcattcagagcggggattcctgttcagatcaaaaatacgaacaacccctcagccgaaggcacccgcgtcgtcagcaagcgggataacacaaacgggcctgtcgtcggcattgccagcgacaccggtttttgcagcatttatatcagcaagtatctcatgaacagagaaatcggttttggccgcagagcccttcacatcctggaggagcatggtttgacgtatgagcatgttccatcgggaatcgatgacatgacaatcattttacggcaggggcaaatggatgccgccactgaacgcagcgtcatcaaacggatcgaagaggatttgcatgccgatgaagtcatcgtcgagcatcatctcgccctgattatggttgtaggggaagcgatgcgccacaatgtcggtacaacggcaagagccgccaaagcattatcagaggcacaggtgaatatcgaaatgatcaatcagggatcttctgaagtgagcatgatgtttggcgtaaaagaagccgaagaaagaaaagccgtccaagcgttataccaggaatttttcgcgggcgtgctgatctcttaatcgtacataaatagcgggcggcagcgcccgctattttttatatcaccttcatatagccgaattcttcattttttctcttgtccactattatccctgccaaatggatcggttcagcatatcttatagtatccttcatagggaggtgaaaccttatgtcaggatactctaacggcggcggttacggcggcatcagttctttcgctttaatcgttgtattgtttattcttttaattatcgtaggggctgcgtttgttggcggctactaagctgctgaccgtctctgcgggaccctgtccgccacagttttgcagtatatgctgaagccatctcgcaaggaggtgcacaaaatgtcaggttacggaacttctttcgctttgattgttgtgttatttatcctcttgatcattgtgggaactgcatttgtaggaggctactaaataaacgtaatctccatgaaggcggcaccgcaagactatgtcctgcggtgtttttttgaaaagaaaaaccccttctcgctaatgagaaggggcttgttcttacgtcattcctctttctgtcacatgaaagtcgagtgcttccgcattagcagaaacgccagccgctgtaaaaatcgcggctgcggccaaacaaataacaaacaacttagatttcaatttcatacaaaccttcactcctttgtatttgttttcttgcctcttcaacttgtagaaagtaggaagcagacagtttaaaccatttctgttcatagtaatattttgctacttctagggctaaatcctctatatcagcgtacatatttttattttttaagtactggaaacatcgttcgattccttcttcattgggctgatcctgatatagggattgcaaaaactcgaattttacggcatagtctgcatcgtctgtttctttagcatattcatagccccgcttgtgatattccgaagctttatcatgttttccctgtttataataaatcagggtgattaaaaaataggcttgcgggagagaattgacgatcctgctgctttcaaacgtggagaccgctttttcaaagtaatcaatggcagggtctagaaggtcttgattgtaatagcataatccgagattgtagtatgctcttccgaccagctgggctttttgttccgcttgggccatattgagcgctaatttgaaatggcgtgcggcttgttcgaaatttctttcatccatcaggttgaccccgaagacgaaatggcattgaatgattctcacattataggtttcctgctccacgtaaatttcataggcgttttttatattaatcaatgaaaaatacgtttgcttcatataataataagcttccgcgattttaaaataaaattcagcccgttcaatatggtctgcgacaaaggagagctttttctccgcctgtttatagtatgtaatggcagaaataaattcccgcttatcaaattcatacatcccgcgaaaaaaattcacgtaatagtcgagcagccctttgagatctgcctggttgctgtcaatgtttcttgataattcagacaggcttggctggtcttcgatatttaatttctctaacggctcaagataatccagcataagctggtgccggaattccattagtgaataataaagcagcaagttggaatcatgctgcatgtgtttcagttcctgctggatttcagcttttaacacttcggcatccggcacgctgaatgtccggatatatctgtaccactcgttaattttttgaccgaccgctgaagaaggaattaccccgctcttcattccttcaccctctcccatcaaaaactgtttatgtcatattttatcatgtttatagaccgtcccaacccgaaaaacacgcaatctttgttttcgggagcacgcaataaaccgaagcggtgtgcaaaaaaggcggatgcatcagttgatgcgccgccctgtatgctattgctgttttgccgttaaaggaaggcggatgatgaactttgtgcctttcccttcttcactcttgatttctactgtgccctggtgcatttcaacgagctgcctgacgatcgagagaccgagtccgtattcaccgtatgctgtgttcgttcttgaaatatctgctttatagaatcgctcccaaatatgctcaatatcctcttttggaatgccgatacccgtgtcttcaatttcaataatcgtctctttataaccttccattccgcgcagccaaatgtcaccgttttgcgtaaattggatgctgtttttcgtaatgttgacgagaatttgaatgaaccggtcataatcggcatgtacgatgacgtgatcctctacttggatcatcagcttgttttgtttttcttccgcctgctgctgcaagtgctctttcacgatttcaaacacctcgatcagaggaacgtctagcttgttcaaggtaatttgctgggatctgattttttcataatccagattttcttttacgagccgcagcatgcgcttcgtttcctcactgatcagcgagaagcatttatcctttttatcctcaggaatcgtatggctgttcaacccttcaaccaaaccgttgatcgtcgtcagcggtgtttttaattcatgtgacacgtcagcgataaactgccttctccgcttctcaaggcgctcgatttcatcccttgactgctttagttttttcgccatgatattaaagtcagacgccagtacgccgatttcgtccccgtagctgttttccaaatggatgtcataatcgccggaagccactttatctgtcgcttctctcagcttttgaatccgcttgacatggaatttggacagaagccagctcacaagaatcgtaatcacaagcgtgctgatcacagcgtaaaacatatagaggttgacctgattgaccatctgttcaacaccgctgatcggagaaatcagcagaacggcgcctttaaattcgttctgaacaaatataggctgcgccacaagggacacttcatcatcaaaacggccatctgccctgatcgtgacagtctgcccttttttcagcttattccattctgatttcttcagctgttcccttggtgggtgatgaaagccttcaggaagaaaataaggctgctgctcttcattaaagatgataaattgcgtctttcttgtgcttaacatgtcctgataaggatagagcctgcgcatgtccacctggccggattggaattcatttgcaatctgcaccgcatatgacgtcaattcctctactttgttctgataggcaaattccttcacaaagtgggaaaacagagaaatgataatgacaaacgctaaaatcaaaatgctgatatggcttagcagcagctgatataaatatttaatcttcatcaaatttataccctactccccacacagtatacaggaaaggcttgtcctcgctggcaagctttttccgcagccgtttgatatgaacgtcaaccgttcgctcatctccataaaattgatagccccatacctgctcaagcagctgttctctggagaacacctgccgcggattttggacaaggtaataaagcagatcgaattccttcggcgtgagattttctacaggctctccgtttaataatacttctctcgtcttcttattaatggtaaagcattccgtttcaatcatatcttcatcaataaccgctttgcctgtcgccttatatcttctgatgacggctttgatgcgggcaaccaatgtcagcgggctgaacggctttgtgacataatcgtccgcccccatctcaaaaccgatgacctgatctgattcagtgtctttggcagtcagcatgataatcggcaccgtgcttgtctctcttatttttctgcagatggtcacgccgtccatagatggaagcatgatatccaaaatgattagatcccaattttcttccgtaaaacgctggtacccttctaacccgtcatgaacgaattcggcttcaaaaccttctttaaaaaagaacatctccgtcatcgtacatacactaacattatcttctatcattaatattttcattatatcctccggttgttttgatgcttttttatataatagcaccattttaaacagaaggttttgcgtttcacaattgttagtttttatttcatcaactagaaatagattgttcatatttttttcatacctttggactactattaatttatcagcaaggggacgcgccccagaggcggtcttatcaataaaaatacctatacggaggaacataaatgaactttatcaaacgggccttttggaatatgaaggctaaaaagggaaaaacgttattgcaattatttgtgtttacagtcatatgtgtctttgttctatcaggcctcaccatccagtcggcagcacaaaaatcaagcgaactggccagacaggaactcggcggaagcgtgacactacaggttgaccgccaaaagcaaatggaaaaacagcaggacagcggtgaaaaacgcagcttcgaatccacaccgatcaaagtgtctgatgcgaataagcttgcagcgcttgatcatgtgaagagctacaattacaccacatcagcttcagccaacgcgggaaactttgatgcgattgaaagctcaagctctagttcaagcgactccagctcaagcagttcaaactcaaatgctaaaaacagtcaaggcggcggacaaggcggaccgcaaatggtgcaagccgatctttcgattgaaggtgtcatcagcacagcattagttgatgacttctctgacggagattcaaaaatcactgacggacgcgcgattacaaaatcagatgtcggcaaaaaagtaacagtgatcaacgaaacattagcggaagaaaatgatttaagcgttggcgattcgatcacaattgaatcagcaacggatgaggatacaacagtaaagctgaagatcgtcggtatttataaaacaacatcttcaggtgatgaccaagcccaaaatttctctttcttaaatccttataacaagctttatacaccttacacagcaacagcggcgctgaaaggcgacgactataaaaatacgattgactcagctgtttactatatggacgacgcgaaaaatatggatgctttcgtaaaagcagcgaagaaaacatcaattgacttcgatacgtacacactgaatacaaacgatcagctttaccagcaaatggtcggcccgattgaaaatgtggcttctttctctaaaaacgtcgtgtatcttgtatcagtagcaggcgccgtcatccttggcctgattgtcatgatgtcaatcagggagcgcaaatacgaaatgggcgtgttaatggccatcggtgaaaaacgatggaaattgattggacagttcttgactgagattctgattgtggccgttatcgctatcggccttgcatctgtgacggggaatctcgtcgcgaatcagcttggaaatcagcttttatcccagcagatcagttcatcaaccgattcaacgcaaaccgcaagcggacaaatgcccggcggcggtggcggcatgggcggcggaatgttcggccacagttcatcaaacgtggacgttatcgattcactgaacgtcgcggtttctatgaacgacatgcttattctgggcgggatcggcatcctaatcgcaatcattgcaacattgctgccgtcaatttcagtactgcggcttcatccgaaaacgatattgacaaaacaggaatagaaagaggcggaacctatgagcttattacaatttcaacaagtcggctactggtataaaaacaaaagccagccattgtttcaggatattaacatcagctttcaaaaaggaaaattctacacaatcatcggaacatcagggacggggaaaaccactttcctgtctctggcaggcggacttgacgcaccaaaagaaggaaacatcctttacgacggaaaagcggtttctaaaatcggcttaaccaatttcagaaatcaatatgtatcaatcgtctttcaggcgtacaacctgctcccgtatatgacggctttgcagaacgtcacaaccgctatggaaatcacaggttctaaagaaaaaaacaaagaatcatatgcgcttgacatgctgcagaaggttggcatcaacgaaaaacaagcccggcaaaaagtgctcacactgagcggcggacagcagcagcgggtatcaattacaagggctttctgctgtgacacgaatcttatcgtagccgatgaaccgaccggaaaccttgatgaggacacatcaaaagagatcgtacggctctttcaagatctggcgcacaaggaaaataaatgcgtcattatggtgacgcacgatgaacaaattgcaaaagtgtcagacatcaatatcagactttcaagaggaagctttactgtgaaggaaaacgtcgcagtggtataacaaaacgcgcctctgccagtgcagacaggggcgcaccctatatcccccttttatatagaagtgaacataaaaagagcggcggccgcatccccccgctctttttatcatttttttgcttcctccccttttgacttctctcttcgtttctttttccaaacggccacaataaacagaaagagcggaaacaataattgaaaaggcaaatgaatatacagcggcaccacgttcaagccttcgttcaagtgctctgaaaagttagttgcgatcgttaaagaaaggattaagatgcccaatcccatcggataagccaattgagagagattcttttccttaaagagcgtagatgtcccaaccacagtggcatataagtagaggctgaccttaaagaagccgccgatgatcagcgccagcataaaaaagacatcgagccggtctaaaaattcttcgaccttgattgtctgaatcgaacttaaaagcgggaactgggatctgagtgtaagatcaacatcaagcacgctgatattaatcgccacggtgagcgccacaaccaatccgctaatagccatggcaatcatccccatttttttcacatcttttctgtcattcaggttagggaaaatcatcacaaataaaacgacttcaccaaatgggacgtacatggtctgcgtgaaaacagagtgaaggataggagaaataccgtttgccaaaaccggctttaaattgtgcgggtctatagtgcctgagacaataatcagcacgagcccgatcgcgcccagtaaatacatgaccccgaaaagaagttcggcagcgcgtgcgagtacttcaattccttttcttacggcatatatgcttgctaccattaataaagcatttacaataatgataggtgtatcatgataagcaaacgtcagcagcatttctccaaagtcacgcagcacccttgcggcaatataggcaaagtacaatatatagagaaatgaaaacagccagctcagcttggttcccagcatatcatccatatattctttcggagaagaattcggataacattgataaatgccttgatacaaatagaaaagaaacattccgatcgcacagcctaataaaactgctatccaagcatccctgcccgccattgatcccgatgtaatcaataaggagctgcccagttcaaaaatgataatcatgacaaacagctgccttatgcttattctggctttttccatctgtcacttcccctttcttcagacctaatcatctttaaactggtgtttgatcggatcgtttcgcaatcccgtccttctgatatacgtctcggccttcacatcgatgggcagttcgggcaaatattctttgtcccatgtgtccttcattttctcccactgctccggatactttctatatatcgtgtcaccaaaaccgataaaatctattttattcttcttaatctttttcacagtatggctaatttccttttcaagctctttgttgagcgctttttcaatagcggccagcaccttgggatcagacaattggaaagggtatttgacagcatcaataataccttcaaccgacactttcacatggatgtacggacgtccgttccgcattttcggtaccagctttgtatcttgatgggtaacctgcaagctgaccgcatccttcgtcttgccccagtcagcattaatcaacgtatgctggatcttattcataagccagactgcccccacgctttcatcatcttccagccaatactttaaatatcctgccttatcaaaaaccgccagaccatctgcctgaagaatggctttcgggtcagtcgcctgcgtgttttccatgctgactccttttttatcgtcaccaatcatcataaatccggggatgaccggtgccatagtgttggcggcaagtgttttcaaaacgtcctgaatattggttttgaccacccgcccgtattgcgcctccgtgaaatccaaggttttattgactttatttgatggaattttatcaattggcgtcaagattttcacaatattttctgcttttgttttatgggcaacgacgaatgttgctgttgacctaaattctgtgtcccggtcaagattatctaatacaaaatccaaaccttcttcttttgccagcttttcattgatcacgactagattggtatgggcaaaataaagccgccgtgatacctttatggaggcttttctgagtgcttccgttaaattgttaccttcaatcgaatagacagatacaggcggcctgtctccatcacctcctccctgaaggccgccggcaacattccctggattgataatttgaagatgcagcacgtagttgctgtcgtttgtccgatcgatgccaatcgccgagataatcgcaagatccgtcagctccctcttatcccagcagccgggcagcacaatggcgctcaaaagcatgagaacgacaaatagacatttacgtaccattcttatccccttcttccaaatctttgttcaccattcctcgtgaagcggccggctctgggcgttgatcttgcccctgccgcaccttatcttccttgctgaccgattccggccttttttcatcggcccaccacggaacccggaaaagcgcgtcctttacgccttgtgaagaaaagggtgcaagcggcgacatatatggaacgccgtatgaacgaagactgcataagtggacaaacatcataatgatccctaaaatcagcccgtaaaaacccataacagctgaggcaataagaaaaataaaccgaataagccgggctgaaatcgccattgcaaacgccggtgttgcgaagctcgcaatcgcggtgagtgccacgataatcaccattgccggagagacgataccagcctgtacggcagcctggccgattacgagcgcgcctacgattgacactgccgagccaacaacccggggcagcctgaatcccgcttccctcagaatctcaaaagcaacctccatcgtcagcgcctccacaacagccggaaacgggacactttcccgctgggccgcaatgaccactaacagctcagtcggtatcatttcttgatgaaacgtcgtggctgccacgtatacagccggagccacaagcgaaatgaaaaagactaaaacacgaagaattcttatgcttgtcgcaatgtcaaaacgcgaataataatcctcaacagactgaaaaaactggacaaataaggccggggcaataagcacaaacggtgttccgtccacaataatcgcgaatcttccttctaacagattacccgctactacatcagggcgttctgtatgatacatagtcggaaacgtcgtaaaggtttcatcttcaatcagctgctcaatatatccagattccaaaatactgtcaatatctattttttccaggcgctgcttcacttccttcagcaccttttcatcgcatattccttgaatgtacatgagagcgatatccgtattcgtaacagaaccttttttcattttttcaacccataaattcggatttttaatgtatcgccggatcatggaaatattggtttgcagagactctgtaaacccttggcgcggaccgcggaatgacgcctgggtgctcggctcttggatggagcgctgctctcccccttgagtgctgcaaatcaaagcttcatcatggccatcagcaaaaatgagcgcattgccgagcattaactcggaaaaaagcttgtcccagctcttttccgctttcaccccgcccagcgggagcgttttttcaagaatttgctggatcgcatgagtattctggatagactcatcctgtaccaatgggtcaattaacgactcatggatcgtgttattatcgaccagcccagcaatatagataacagctaggtggacatgatcctgctccccgattttaatctcgcgaatgatgacgtcagagctgcttccgacttcctttttcgtttccgctatattctttgccaaacttggagaaatgagaaccggcctttctttttcttgctgctgttcctggttcctctcgtcagtattctgcttgtcttttgaaccggtattgttctttcgcttagaaaataaaggcatacacaaataccattccttgtcgttttctcatattcttccttttaaaattgagattatgcatgaggtttagatgcggtataacatctccgccaacgatagacactaaaagcggaggatgatgaagcatgaagatattgggcgtgactggagtcatattaatttgtttattagctatttctgtgttgatggacatgcttcaagggttcagtttaacaaaagccgtttataacaatatgtccagctttaagatttcaacatttgcggaatgggttgtaattttattttttgttttagtacttgtgagggaaatatacgtgatctataaatcgaaaaaaaagaacccctagagggggcgcttttttcagacaatcatattgccgtctattgtatcactgctgtgtttgttgatggtccctttaaaaatgcggttgccgatgattttggaattggttgatgtggttgtttgaatagctgtcgcagtgcccgcggagaggttattgatggtgtttcctgagacgatagagcctgcagagccattgagataaatcacaatcggattcccggctgttctgttgactgaaatggtattatcaaaaatctcatgcacaccggcgctgatatagatggtgaccaaaagcggagatctctctaagtggttgccgataattgaggttttcgcacttgtggagcaataaatggggtaatttttgaactctttaaatgtattgtttttgatgatggcgccggcattgtttgtgacggaaacagaatatgattccggcactgcttcaaacgcgtcaggattcagtatattcccttcaatcaccgcgttcccttgagcaatccaaatgccccggctgaattttctcaggagattatctttaatgatcatatttccgccggaaacgttcacaccgtcaacgacttgaatgagacagttattcagaaaagcgatgtcatctgacagcactgcgcgaagaccgatgctgcgccttgtttcagacagtccgttttgaatttggtttccgtctacctttacgtcggaagactgataaaccaatatccctgtgttttcaaagttgctgattttgttgttcgtcacaagaacgctctttcccctgacatcaattccagttgaaaatccggtaatgaggttgccagcgatcactgcatcactggtctcttttccttgtgatacaccgagtccggttatcccgactcttggcgcagccgccgcgtcttcagggcgcctcagtatatttcccttgatcactgtttgcgtcccatatccgtagctgattgtattgtcagagtgatttccttctattaaaatgccatacccgttaaaattggtcacagaacttgaaacgtttccaacaaagtggttattgcgaattgatacattaatcggttcctcataatcaacgtcaccttcgccatatccttcaatgtcaattccgaatttcggggctgttccattccccgttccggcatcttcaatcaagcactcctccaccgtgaccatgtcacatccggtaatggaaatgttatttctcctcgaccgccgaacctcacagcggcggatgataatttgctctgacgttcgataatcttgattggtctttaatccccttgggctgactatgatcccatcgccggtaaaatcggaaattttcacatcatcaatgagaacattcgagcatccttcaatacatatgccaaagccccattcatgggttgaccttatccccgccgagacatacgtatgctcatcccgttcgccgataatttgtcctccggaaatagttatattctcttgcttgcctacataaaatgcggaataaccccacgaactattcggtatcactttcatgatacattcggggtccatcataatctcaaggttgccgggaacaatgatccccgcgtttcgaaacctctgattaagatctccgccaagcgttgcgtctattaaatatgttccctttggaaaccagacagtatgatagcctttcgaaacagctgtactgaggcactgattaatccgttctgtcgaatccgttttaccatctccaggaacaccgaaatccgctgcatttaatatgaattcagccatttgcgagcctccttctctatgattactatcatgttactcacaaaggcccgatctgcttgtacatttctctaaaattttattaaaggaatagttatgtaagaaaatctcacgataaagagtataaaaattaggagaaaatcactatttttaggtatttataatttttccattatggaactatttgaaatgagtataaattatattgacacaagtattatataagaatatgatttttataatacactttttttagaaagggtttggctgacatggcttcgattgataacgaaagtatcattaaaagcgtcccgcaaaaagggttctttggtcacccgcgaggactatttacactatttttcaccgaattttgggagcgtttctcttactatggaatgagagcaatcttactttactatttgtatacagagacggtaaacggagggctcggctttgacaagggcactgcggttgccattatgtcgatttacggatcactcgtatacatgtccaccattattggcggatggctcgctgaccgggtattcggtaccgcaaacaccgtgttttacggcggcatattcattatgttcggccacattgcactcgcctatccgggcagttcgatagcattctatatcagcatggtgcttatcattgtcggaacaggcttattaaaaccaaacgtttcaagcgtggttggggatctttacacgaaagaagacccgcgccgcgactcaggtttcagtattttctacatggggattaacctcggtggtttactcgcgccgttaattgtcggaacactcggacagaagtacaactatcatctcggattcggagctgccgcggtcggaatgcttctcggacttatcgtatttgctttgacaagaaagaaaaacctcgggcttgcaggttccaatgtgccgaatccgctgtctaaaaaatctgcgattggcaccggaatcggtgttatcattgtggcgatcgcagtgattatctctgtacaaacaggcgtgctgacgatcaaacgtttcatcgaccttgtaagtattctcggtattttgattcctgtgatttatttcatcatcatgtttacaagcaaaaaagcggacaaaacagaaaaatcccgtcttgccgcttacgttcctttgtttatcggtgctgtcatgttctgggccattcaggaacagggagcgaccattcttgcggtatacgctgatgaacgcataagactttcattgggcggattcgaacttcagtcatcatggttccaatcattaaatccattgtttgtcgtcatttttgcgccaatattcgcatggctctggatgaagcttggcaaacgccagccgtctacaccagttaaattctcaatcggaattattttagccggattgtcatttatgattatggtattccctgctatgcaaggaaaagaagcactcgtaagcccgctttggctcgttctcagcttcctgcttgtcgtgcttggagagctgtgcctgtctccagtcggtttatccgtgacaacgaaactggcacccgctgccttctctgcacagacaatgagtatgtggtttctgacgaacgcagcagcccaagcgatcaatgcccaagtagccggattgtttgataaaattcctgaaacaatgtacttcggcaccatcggtttgatttctatcgttcttggcggcattctcctgctgctctcgccgatgatcaaacgcgcgatgaaaggggtcttataattagaaacagcccgcggattttgatctgcgggctgttttttttattgatccagccatttgctgaagctttgatcaaaggcttccggttcttccagcatcggctgatggccgctcttttcaaaaataaccttatccacatggggatataaaccgtcaacagcatcccatagcgcaacaggcgcaaccaaataatcatatctccctaatccgatatacaccggcatacgaacatcagctaaccgctgaataagatcaagccgggcaaatgttttgccccataattcatccatgatcggcatattcgtgaatacaccgtcccataaggcagcagcatgcggccgctcttgataaaagcttttcgcttcagcacgaatacacatgtgcacgaagcgcctttcaggatctttgtcgatgtcctgcggcaaattctcgatgtctttttcaaagcgtttctttctctcaagactggctgtttccatgaaaaatgattcgctttttcgctgtctttcttcactgttatcaggcgcagtattgaagagcgccaccttccgaacttgtttgggatatgtcctggcatactctaaagccataaaagcgtgcccggaatgtcccaggatagtaacatcctcaagctgaagaaatgttctcatcctttcgatatcagccaagacggcatcaagcctcgaatcctccgcacgaagctcccacttaggcttagcaaatcccctatggtcgataaagacccattgatatttctgtttgatatctgaggaaaaaaggcgcggatagtaaaccgcactcccgatcacaaggatgggtgcgccctcgccctcaattcgataagctaaatcaaagccgtccgagtgacagatccccgcacgttccatttctcacgccccctttgttttcattatataaaaaaagcctgacgcatggcgtcaggctatcgatattaccgctttaaatcttccagggtcttttcccatctgctcagcacctcttcagcgctgtgaagctgtatacggacacctgaagtcaaatcagcgtatttcgcaacgtcctccttcactgaaacgatgcggcaggaaaaacggtctctatcatattcagcatctttcaaaggcggtaaaggcgcgcattcaagctttacataataggccgctcccttccaccacgccgtgaactgtgcttttcctgtgcgaaggatgttggccgaagtcattgtgtttttccacagagcgattcggatatcagttcggctcagcgcgatgatttcacctgcactgatcatagcggcatgcggccagccattctctgatactgtttgcagaacgaaggcctcatgctgcttctcattcaggcagctcccgtcaagcagctcaaagaggcggtctgacatacagttcacgcggatcaagcctttcgttccggcaccgccggaacttcaattgctgtttctgtttcctttggatcaattttaaacgctggattgtatttttcgggatttgtaatgctttccggttcacaggatctccatgtaaaaaagcatgtttggcactgataaacttcccatgcgccttctacaggcgatttgctcatgacttctcccttttttgagtcgcatcgaggacatgtatgcatttcgaacatcctttccttatttattcattaagtccattagtttttgttcccattctttcgttgttagcggagaatcaagcggctgtgaataatggcctcttgtttccggcgcaaccggtgtagtggcgtcaagaatcattttgtgagtgattcctgatggattggatcccggatcaagcggcaggacagataagtccggaatgatgaccgcatcgtgtttcggatgcattttggtcgaaagcgcccacatgacctgcggaaggttgaatggatcgacatcctcatcaacgacaatgaccattttgcagtagccgagtccgtgcggcgttgtgagtgcgcgcatgccgaccgctttcgcaaacccgccatagcgggtttttgtggaaacaatcgcgattaaaccgtgtgtgtacatggcgttcactgccacaatttcgttcgggtacgcttcttttaactgctgataaagcggcacgcatgtgttaatgccgatcatgtaatcgcattctgtccaaggcatgcctaagtataaatgttcaaagatcggattgtttctgtgatagacgcgtttaattttgataatcggcatgctgcgtccgccggaataatggcctgtgaattcaccgaacggcccttcatattcgcgctctccggcaataatctcaccttcaagcaccacttcagcgccccacggaacatcaagatcagacagctttgatttgacgatgcgatatggttcgccttgaatcgcgcctgccatttcgtattctgattgatcatagagaagcggagtcgatgccgccgttgtaatgaccggctcacagccgagcgcaatggtgaccggaagattgatgccgcgttcttcagcttggcgcagatggattgcaatatcgtgctgcgggacaggctgaatgccgagacggtcttttcctttgacctgcattctgtaaatgccgacattttgtttgccgaagttgtcagggtcctcaagatcacgggaaatgacacatgctttgtctaaatagtagcctccatcaccctggttaattctgaaaagaggcagtatatcgaacaaattgatatcttctgtgatttcattttcatgaaatggcgctgtttcctcacgtttgaccggcatcggaaactggtcataacgctttgcgaattcaaaaaactgttcttttaccggtgtgtctttcggcatgcccagcatcatggcatggtttggccaagagccgatgacattcatcgcaattcgcgcgttatgatagccgtaaatgttgttaaataagagcgcagggcttttatcgccaagattgctggctgcccgtgcggcggcccctaaatccggttccggctttacctcttcattcactgtaagcagctgtccttctttttcaagggcagtgagaaattctctgaaatcttgataagccatgatcaagctcctcctttttgtttttcaatcccattccagcgcttcgcttcaggaagccgaatgccgaattggtccaacgttctgaatacaatatggtcaaccatttcctctaagctgctcggctgattataaaatgccggcatcggaggaagaatgattgtacccattttcgtaagcgctagcatattttcgagatgaatttggttcaaaggcgtctctctcgttaagaggacgagtttttttctctccttgagcatgacatccgccgcacgtgtcagcagattatccgccattccggtgcgaatgcttgcgagagatttcatgctgcacggcgcaacaatcattccatcggtatcaaacgacccgcttgaaatggctgccgcctgatccttatgtgagtaagtgtatgtggccagttgttctacttcttgtaaggtatagcctgtttcgtgtttgatcgtgacgtttgcccaaggagacacaacgagatgggtttccactccggcggccttcagccactgcagcagcctgaccccgaaaatggcccctgttgcccctgtcattccgacaacgagtttcactttgccccctcctttacgcttgaattctgctttcatttcaatcatactcctgatatatccatatgaaaaatatctattaaatctatatttcatacctaaaaggtatgataaggaggcgctttcttttggacattcgccagcttcgatatttcattaccattgcccaagaacagaaaatcacgtccgcagccaaaaagcttcacatggcgcagccgcctttaagcaggcagctcaaacagctggaggacgagcttggtgttgttctgttcgaccggaacaagaaaaaacaaatgactcttacatatgaaggagctgtttttctaaaaagagcaaaagagattctgcataggtttgaagatgcagtcattgaggtacaggagctgaaggaggaagtagccggcacacttgccgtgggatcaacaatttattgcgcggctctgatgcttgaaaaagtaacacaaatcaaagagagatacccccatctcacctttaatatttgggaaaatgagcccgcgacactgttggagctgctggaaagccggcaaatcgatgcggcggtcacgacaacactgatcaaaagtgacacagtacaattcaagcagcttgatgacattccatgtgtgctcgtgctttcagatgaagccggatatccgtgcggagacaccattaagatggtggacattccttcatttccgctgatcctgctgcggcctgtcaacggaaaaggcgtctataatcaggtcatgaatgaatttcatcgtttgaacctggagccgcgcattgtttgtgaatgccacgactctgcaactttgctcagcctcgtgtcatccggattcggcgcgtctattttgcctgtcacaatgattcccgttcatatgagaaatcacgttcacaccgtccatatcgaaaataatcccttcattatgacaccggctgtcatgtggagaacggacagttatttgcctaaaccggcacagcaatttttggatttattttaaaagatttcgccttatgaaaaccaattacttgactcatactaaaaaaaagttatcctttagatttgtaagctatttttttatttcaataaaatcaaccagaaaagtggggaataagatgaaaaaagcattattggctttattcatggtcgtaagtattgcagctcttgcagcttgcggagcaggaaatgacaatcagtcaaaagataatgccaaaggtggcgatctttgggcttcaattaagaaaaaaggtgtgctcacagtcggaacggaaggaacatatgagccgttcacttaccacgacaaagacactgataaactgactggctatgatgtcgaagttatcacagaagtcgcaaaacgcctcgggcttaaagtcgactttaaggaaacacagtgggacagtatgtttgccggcctgaattccaaacggtttgacgttgttgccaaccaagtcggaaaaacagatcgtgaagacaaatatgatttctcagataaatacacaacatcaagagccgttgtcgtaacgaaaaaagacaacaacgatattaagtctgaagcagatgtaaaaggaaaaacgtcagctcaatcactgacaagcaactacaacaaattagctacaaatgccggcgctaaagtagaaggcgttgaaggcatggcgcaggcccttcaaatgatccagcaaggccgtgtcgatatgacatacaacgataagcttgccgtattgaactacttaaaaacatctggcaataaaaacgtgaaaatcgcgtttgaaacaggtgagcctcagtcaacatatttcacgttccgtaaaggaagcggcgaggttgttgatcaagtcaacaaagcattaaaagaaatgaaagaggacgggactctttctaaaatttctaaaaaatggttcggcgaagatgtttctaaataatctgccggcattgacgcttggcacggcgatcccgtgggatctggtgcagcagtcattctggccgatactttcagggggaatctactatacgattccccttacgattctttcctttatattcggaatgatcctggcgctgattacggcgcttgccagaatgtcgaaagtgagacctttgagatgggtgttcagcgtatacgtatccgcaatacgcggcactcctcttctcgttcaattgttcatcattttctatctgttcccggcctttaacgtcacattagatccatttccaagcgcagttatcgccttttcattaaacgtcggcgcctatgcatctgaaatcattcgggcatctattttatccgtgccgaaagggcaatgggaagccggctacacaattggcatgacacatcaaaaaacgctgttccgcgtcattttgccgcaggcgtttcgtgtgtcgatcccgccattatccaatacctttatcagcctgattaaagatacatccctcgcctctcaaattctggtcgctgagctgttcagaaaagcccaggaaatcggcgcgcggaatcttgatcaaattttagtgatctatattgaagcagcctttatttattggattatctgcttcctgctctcactcgtccagcatgtcatcgaacggcgtcttgaccgctacgtggccaaataaggaggttccgagtatgcttaccgttaaaggattaaacaaatcattcggtgaaaatgaaattttaaaaaagatagatatgaagattgaaaaaggaaaagtcatcgccatacttgggccttcaggttcaggaaaaacgacgctgctccgctgcctgaacgctctggagatcccgaatcgcggagagcttgcatttgatgatttctccatcgatttctccaaaaaggtgaaacaggcggatatcctaaagcttcgccgaaaatccggaatggtgtttcaggcgtatcacctgttcccgcaccgcacagccctcgaaaacgtgatggagggccctattcaggtgcaaaaacggaacaaagaggaagtcagaaaagaagcgattcagcttcttgataaagtcggattgaaggacaaaatggatttatatccgttccagctttccggcggccagcagcagcgcgtcggcatcgcccgcgcactggcgattcagcctgagctcatgctgtttgacgaaccgacctcagcgcttgatcccgagcttgtcggagaggtgctgaaggttatcaaggacttggccaatgaaggctggaccatggtcgtcgtgacccacgaaatcaagttcgcgcaggaggttgcggatgaagtcatcttcatcgacggcggcgttatcgtggagcaaggaccgccggagcaaattttctccgcaccaaaagaagaacggacacagcggttcttgaaccggattttgaacccgctgtaataagaaaaacagggcgccagcgccctgtttcagattattgacaaaatcctaaaacgattttcgttttaggattttgtgattttcagcgtgattgaaaacctttgaagtctaggaagggcgagcattggagcacagcgaatgttaaattcgtgagcaccgaagcacaggcctgacaacgaatgcaagggtttgccaacacgctgaaacagggcgcctgcggcggccctgtttttttgttgagcccctttcgcctattccgcccttctgtcagatgtgctacaatgacaatcgactgatttttacgaaagaagggacctcacgtgaagcaagaacttgttctgcgctggacattttattttgccggtttgatcattttggcttttggtgtatccctgacgatagaaggaaaagcactcggcattagtccgtgggatgcatttcattacagcctgtttcagcacttcgggcttaccgtcggccagtggtccatcattattggagcgctcatcgtcggattcacgtcattgtttacgagagcttggccgaaaattggggccctcctgaatatggtgctcattggtgtatttatagattttttcaatttcattctgcctgccccctcgacctacacaggctcgatcatcgtcttctctctaggcgtggtgctgatcggttacggcgtcggtgtttatgtatcagcaggccttggcgcggggccgcgtgattcactgatgatgctgattaccgaaaaaaccggctggaatgtgcaatgggtgcggaacggcatggaaataaccattttgtttgcggcatggggcatgggtgggccgatcggttttggcaccattttgaccgccatcctcaccggacttattttgcgcttttcattgccccagtcaatccagctgctgaattatgctgtggcaaggcggacagccgctgtgaaagcatctcctcctgtacactaaaacaaagccgccttggctttgtttttttattttctcctctatatgagtcttgtggaagtatgataggatggttttgacaatcttttgcagacggaggatctagaatgaagatttacggaatttatatggaccgcccgctttcacaggaagaaaatgaacggttcatgtctttcatatcacctgaaaaacgggagaaatgccggagattttatcataaagaagatgctcaccgcaccctgctgggagatgtgctcgttcgctcagtcataagcaggcagtatcagttggacaaatccgatatccgctttagcacgcaggaatacgggaagccgtgcatccctgatcttcccgacgctcatttcaacatttctcactccggacgctgggtcatttgcgcgtttgattcacagccgatcggcatagatatcgaaaaaacgaaaccgatcagccttgagatcgccaagcgcttcttttcaaaaacagagtacagcgaccttttagcaaaagacaaggacgagcagacagactatttttatcatctatggtcaatgaaagaaagctttatcaaacaggaaggcaaaggcttatcgcttccgcttgattccttttcagtgcgcctgcaccaggacggacaagtatccattgagcttccggacagccattccccatgctatatcaaaacgtatgaggtcgatcccggctacaaaatggctgtatgcgccgcacaccctgatttccccgaggatatcacaatggtctcgtacgaagagcttttataaatggctcatcaacagcttgacaccgcgctcaatatcttccgttttcacattggaaatattgatttttaatagattttctttctgataatctgataaataatgacggtctatcgcctcaaggatcaccccttgttttttcagcctatgaatcactcttgaggcgggaagatcctgaggaagcaccaggtgggtgtgcatgcagggtgcctgcccgctggagaacgtaaagcggcctcttcccagctgcctgtgtgtttgaatggcttgatgtagcttcagcgaccgctctttataagaatctctgattttctccttatgcctgccgtacataccgcttttcaggtaaatctccaatgccgcttgagaaatcatcgaacagtcgatgtcgttcagttttttgtacgcatagaacgtgtcagtcagcgcttcgggcaaaacagccgcccccacgcgaaggccggggaatatcattttcgagaagcttttcaaatagatgacatgtgaggacagatcatatgcgtacagcggatctgcctttttattttcctccagatcaccgaggtaatcatcctcaacgaggtagacatcatacgcttctcccagtctcacaagctcctgtttatcacgctctgacaaagagcagccaagcgggttatggaagcgcggcatcgtataaaaaaatttaatcgattctgtttgaaataaccgctcaacctcagctatatcaagcccttcttccgttcgtttcaccccgatggcgggaatcccaagcgtctcaagctgttcgaccatcaaatggtagcccggctgttcaatggcgatcttttctttcccatttgggaacggcatggcacaaagcaaggataacgcctgctggacacctgatgtaatgaaaatatgccgttcatccgcaaatacctgttgagtggccaagagctttcggagtacgcggatgagtgatggaagcccctttggcgtcccataaataaacaaatcgtttttgtatgtatcaatcgctttgttgatgcagtgctgaaaatcaagatacggaaacacatctgggtccggcgcagatgtggcaaagtcgatggggccaggctgcccgctttttgatttccctgcctttttcacaatataatagccgctttttggaacagaatagataaggtggcgcttttccagctcctgcagcgcgcggatcactgtgcttttgctgacttggtagcgggcggacagctgacggatagatggaagcctgtctccttcttgataggcggtgctttgcatcatctcctctatcctcgttaatagactcatatatttttccatgccttctccccctgttttgtaccggtacagttcattgtttttctcattgtaccgttctgaccgcggccatacaataaagggagcgaccggcgctgcaattcaggtaaaggagcccttcccattatggttaaacatcagcaaacccccgcttatatagcggctattttatattcgttcattatcggtttatcctttctattcgtaaaaatcgcactgcaaacagcagagccgtttgatattttggcgcatcggttcaccattgcgtttgctgcggccactatatcgatcttattcggctgggtaaagctatcaatccgcataaaggacgtcattgccattttgccgctcgccctgctgtatcccgcgttatttttcagctttcaggcattcggccttgtgtactcgtcctcctctgaagcgggaattattcaggcagccattccgattttcacgatggtctttgccgcttatgttttaaaggaacgcccaacgtggacgcaaaagggattcacagttttatccgttgccggcgtcatgtttatttttgtgatgaaaggcgttgacgtggaatcagccagcttaaaagggtctttgctgatcctattgtccgctttgtcctcagcgatgtacaatactgctgccagaaaaatgacgcagcggttcaagctgaccgagctcacctacatcatgtcagccatcggctttgtcgtcttcaacgccatcgcccttgtgcgtcacggatcggcgggaacagtcggcacttattttctgccgttccgggagcccggcttcgttctcgccattgtgtatttgggcgtgctgtcttcacttgtcacttcatttctgtctaactatacgctgtcgcgaattgaggcgtttaaaatgagcgcttttaatcatgtatctaccattgtgacgatgattgcaggatttgtgattctcaacgaaagcctggcctggtatcatcttgccggggctgtttgtattatgattggcgtggtggggagcaatatcaatctggagaaaaaaacaaagcgccctggtatgcctgcaaaaaaatgagaaattatgctagactaaaaggaaaaacatggttagaggtgtaggtttaccgtatgattcaatatgctagtgaaagtatcaatcttccaggagaaatcacttttaaggatgtaagagaaatctttttttatcaaatcgcaaaaatatcatgcttttactttctattgttttgcgccatatttgctgcagttaacttcattaacggatggccccgtatcgtttatggaagtgacgcgcttaacttgtttatgaacagtatgttgattatcgtgatgtccgttctgtttacactgctgctcctccttcttctatatgtgaagttttccagagcatacaagaagaacgaacggatgaaatccaaaagaacatatactctgaaccaagaaggaattcgtatatgttctaaaaaatatgacctcattttcaattgggatgaaattacagctgttttcgaatataaaaatatcttcagggtcaatacatcaagtggccaatatattgcgatccccaaacatttttttcactccgaagaggagatgaacagattcaaggagattatccttaaaaataccgaaacaaaaaaactcaaatttaaaaaggatcagcattgacagtgctgatccttttatattgaatggtgggtttcttttgccttctgtttatctaaaaacggcaccagctctattacagccgataaacccacaaacacgatgcacacagcgacaatcagcaaataaccatgagtcatgtcaaaaaacaaaccgcccgcatacacgctaagagctccggcaacctgatggataaagaaattgatgcctaacagcgatccgatcaatcctgtttgatagctttccgaaattgacgccgcggtcagcgggatcacgcctgtgtaactgagcccgaataacaggataaacccgaagtaccaaaggtcgctgtgatgaattccgagaatgggaatgagcaggcaaatgaggctgagcagccgaatgaaaaataagatggatagcatgacgcttctgctgccgaggagatctgacagccagcccgccaataatccgccaatgatgataaatgccccgaacgcggccatcattccgttgacatgagagacatgcgcatccttcagtatcgggacgaggtgagcatcaataattcccattgtaaatccgcaagtaaacacgccgaagtacaggatatgaatgaggcgggattgcttcatcacgttccaaaaccctcgccaatcataagattttttcacagtttccgcttgcgcatgtggcgggtgcttcatcccaaagacgaggagcggcagcagaacagccgccatgacgattcccaaaatggtataggtgctctgccagccggcatgatacggagccgcagcccaaatgggcgagagaagcagcaggcccgcagagttggcattggtcaaaatagcaagcgccagacctttatgtgtgtcaaaccaacggctgatgaagtactgggtcgtcacgccgaccgcgcaggaatagccgattccgccaagcacaccgtaaatggcggaaaacacatgaacattcggtgaataaggaagcaccaaaaagcttgcgctgatgcagacagctcccagcgccataatttttctgacactgaaacggtcgataaaaaaaccgacaaaaaactggacgatgccggttgtgatcataaaaatgctgacagaaaccgagatcagcgacctgtcggcatggaaggcatctgccattggcagcataaaaaattgaaaggaatttctgaatgagttcattccgatggcgaaaacaaacgtaaacagcaatacaaaccatttcatcctgggagacgtgcgcatgtttcaacctgcctttatttgagtatttcgactattataccatgcaaaaattggcattcaacacaaaaaaagcggaacagccgaagctgtccgcttttgatcacggttgaatgatcggatgctgattcaagatcgcaaaaatccgttctgcgacttcttccgtttgtgacagtaggaacatgtgcccgccgtcaaattgatggaatgtgatgtcttttgcccacttcttccacccttccgcatctcgtatgcattttttatcatcaagcccgttaaagacatgaacaggcgactggatctgggccagatcgtaaagctcaaattgttcaagagcccggtaatctgatcggaaagaaggcaggaaaaaggacatgacctccttattttcaacaagctctgcgggcattccgcctaattggataatatgatcgagaaactgatcatcaggcagttgggacactttcttccgctgaatatgaggcggctggattgcagaaatgataaccgcctgcggaaagatgccttcacgctcaagcttttgcgccagcctgaaggtgatcattccgcccatactgtgtccgaacagcacaaacggccgatctgggcgaaggttcagttcttgcttgtacaaatccgtcagctcttcgagatcctcaatagctgacgtttgattcgtgccgtgtcccggcggctcggcagcgagcatctcgcactccccctgcaaaaaagcatggagagggcgaaacgacgccgaatagccgccggcaaacggaaaacagatgagctgtgttttttccgacgcatcaaatgatttgaagagttggctcattggctgtctcctcctttcatcacttcatttatgaaaccgttacggtttgtgtattaagaaattcgagcaaaatcccggcattcctatctagcgtttcgccctgcagcatttctgcgtgtgttccgaagcctcttttcacacggtaaacacctgttgtagcttcttcccatgatgcaagccattccggcatgtcaaaatcagcgccggaagtcaacagatcaatatctgctttcacctggcctgtgctgatcaggttgacgtagtatgagtaaaaggcatgtgttttttgcttgaggccttgtttgacggcttcgctgttgagcgcttcattgtcccgattgacattcatcaacgcttcgacatcactttcaaccgtgcgtccgtccagatcactgacaccttgttttttataggaatccaccatgatgatccgctgaacaatacggccttgttcctcaagctttttcgcagcttcaaacgccaggctgcatcccgctgaatatccaaacaatgttaaaggcccttccggctgcagcttctggatcaaatccgcatagcggtcaagccggtcttcctcctcaataaaatcaaaggcgcacagcttgtatgacggcaagcgactggacagattttggtacataagaccatagcccaagaccggcgggaatgcgaatatgatctgctcctgatcctgattcattatcgttacatcctgcaagcgatcaggacccccatttttcaaatacgctgaaatgccggcgatcgtcggcgcttcaaacaaaagctttactggaagatcaatcccgagctctttcttgatgcgggacgcggcggtcatggccttcaaggaatgccctccgagcgcaaagaaatcgtcatgaatgccaatttgctttctgccgagaacctcagaccatatttgtgcgattgtttcttccatctcgttccgcggtccaatccattcttccgccagctgatcctgatcaggttttgggagcagccgtttattgactttcccgttcgtcgttaaaggaagctcatccaagaaggtaaaggtttgcggcaccatgtaagcaggaagctgttttttcaggtgcgccttcacgtcttcagctgaaagctgcgttcggttcacaaggtaggcattgattgatgcatcgccagactcagggcggtccgccacaacgaccgcatctttcacacctgggtattcctgcagctgcttttcgatttcttcaagctcaatccggtgtccgcgtattttgacctggtcgtcaatacggccggcgtattcaatcgttccatccggcagccagcgcgctaaatcccctgtgcggtaaagcgtttctcccggcttgaacgggttcttaataaacttttccttcgtgaggtcagcacgatttacatacccttttgacacgcccattccgctgatgcacagttcaccgatcgccccgaatggctggagctggctttgctcgttcagaatataaacactggcattgctgatcggctttccaatcggcaatgaggagatggaatccggcagatcatgcacgacgtgagctgttgcaaacactgttccctcagtcggcccgtagcagttaatcagcttgcccggccccatgatccgcagcgcttttctgacatgaggcactgacgcgcgctctccgccgaataatatacagcgaagccccttcatccaatcctctcccgcatctgtgagaagattaaatagtgcggttgtcgcaaacatgacattgacattctcttgcaggatcagatctgtgagccgttctgtatcaagcagcgtatgttcatctgcgataatgagccgtgccgcattcagcatagaagcatagaaatcaaaggtaaatgcatcaaaggcgtaattcgaaacagacaagaacgtatcctgatcagaaaatgccatgtagtctacatgcttgaccaatccttgaatattggcatgagtggtcatattgccctttggctttccggttgtgccggacgtgtacatgatatatgccggatcattaggatcaatcgcggttgcaggatcgcttgcctgttcttcaaaccgtgtttgatcatcaatgaagagcgttgtgcctgtatacggcagctcagtcgcttgttctttcatctcctgatgcgtcagaagacaggctgccgcactgtcagccagcatatacgagattcggtcctctggcagcttcggatcaaccggcagataggctgctcccgcctttaatacaccgagaatgccgatcaccagttcaagtgagcgcttcgtgtacagcgctacaacagagcctttgcccgcaccgtgtttttgcagccggcgtgcaatgcggttcgcttcctcatctaattcgcgataagacagggtctggccggaatacgtaagcgccggtgcatccggattggcgttcactgcttccttgaaccaatacgtcagaggctttgtttcatgagcttgagccggcgggtttaagccggttagcaaaaattctctctccctgtcgtcaacgaggttgatcgtgctgacaggctgatccggattctggatgagctgctgaattgctgtgagaagctgagatttcaagcgcaggataaacgcctcatcaaacacattctcattataggcaagcttaatcagcatctcatctcccggggaagccatcaggttgagatcataattcgacttctcaaaaacatgaacatccaccatatcaaagccgttttcactgctttcttcatttttcgcatcctgaagcggatagttctcaaaaacaatgatgtggtcaatcagtttcggctgatcggcctggctttggatgtcataaagcggcacatattggtgcggctcagactgcagcgattgctcctgcagctgcttgagcaagccgttaaatgtgataccctcagacagcttcacacgtctcgggacaacgttgataaacagcccgaccatatgttcaacgcctttgatttccgcgggacgccctgaaacaactgtaccgaaggccaaatcgccagactgctgatagcggctgatcaatacgctccagactgcctgcagcgccgtacttaaagtggtatgctgcgattttgcaagctcagtaaaagcctttgtttccgcctccggcagtgaaaagagcagctctttcggctcatagccgtccttctgtttcttcctttgctccgcaaacgtcgtttgtccttcaaagtcctccaagtactcgcgccagtagcggagcgatgcttgtttatcctgcttttcaagccacttgatgtagtctttatacggtttgacgggcggcaggctgtacggcttttgttcgcgcagagcattgtataccttaaatagatcctgtacgacgatgccgaagcaccatccgtccaaaataatgtggtggtagctccacacccattcaaagctttcttcagctttcttgaaaatggctgcccgcatcggaatatcccgcgtcaaatcaaaacccctgatcttatcctgttctttgtactcattgattttggctgtttgctcgctgcccgttaagtgtgtcagatcgatttcttctatttggaactgccgttttttcaatacgacttggacaggtctttttactttttcgtgaatgaacacggtacgaaatacatcgtaccggtccatgatcacattcatgctttcttcaagacatttgatattcaagctgccttttactttcatcgtgatttgttcaaggtaaaagctttggccgggattcaggatggcatgaaaaagcatcccttcctgcatcggcgataggtaatacatatcttgaacctgatccttgctaaattgactcatatgtttcgctcccgccttctgtaattcccttgcgttttattttaaattctcctcaagcatgtcaaagatatctcccatctcgtccatttcaaggtcttcggcgctaaagtcgcttggtgtgaattccttgtcttctttttccgtgcaatggcggattagcatcaggaggttttctttaaaccgttccatttgctcctcgactgtagctctttcaaactccttctcattgtaggagcaggaaagcacaaaccggccgtttctgatcatgccgctgaagcttaaagcgtacagcgcctctgattctccgcttacttggcgccccatatcgaaagcggacggttcaaagaaatcggttttgacttcactgtcgaattggcccaaatagttgaagctgatctccggtgtgaagccctttgtttccgctgtttctgtgaaataacgaagaatgccgtagccaacacctttgtccggaatgcggcgcaggttttctttgactgttttgatcacagccgaggcatctgcgtcagatatgtcgagcacaacagggtattgtgccgtaaaccagccgaccgttctggagatattcacattcgggataatgtcctcccggccgtgtccctcaaggttaatgccaattttggccccctttgtccattctttcattgtcaaaccgagcgcgctgagaagaatatcgttgatttcagttccatatggctgatgaacatctgttaaaagatgcttagtgtcttcttccgttaattcacataggacagatgatgtatccttgacgatccgctgctctgttttacaatccttcggtaaaggagaaacctgttcagcggcaatttgcgaccagtattcagcctgctgtaaaagatgcgctgattggctgaatgccgccagttcttccgcccagtccttgaaggagtttgttttttgcgggaagacaaggctctcttctttctcagcctgcatgtagcctgaagcaaaatcttcaagcaaaatccgccatgacacaccgtcgaccaccagatggtgtacagcaatgagcaggtgatccccggcttctgtgcgatattgctccgcctttagaagcggcccgttttgcagatcgagactgctctgcagcttgttcgcgagaattttaatctggcttctcagcatctcttcatcggagccgtacagatccacgatttcgaagctgaccttgctctcactgatcggttgatacgcctgaacgatgtccccgttttcctcacgatagaccatgactgtgcgatttttaaaaactgaattaacaggtacgttttgtcttgtttagttttcaaagaactttgtgtgcttctctcgaagcgactacttaatagtaacatttttagttaactaggtcaatacttttttaaaaaagtttttactagtcataatggtcatgcttgtgtctttaaaaagacaacagaaatgattataccataatttttatggctgtaaagggttatgacaaaaaaagcacagctatttcagctgcgctttttttcacacttcttcttgttcttcttcattctcatcttcttcgtttttctctactaaagctactgtagcaacatgctcttcttctgccattctgatgagacgcacaccttgagtgacacgtccggtgatggagatatcattgatgtccattctgatgagtacgccgctagctgtaataatcattagatcctcttcacctttagtagctttcactgctactagttggccgttgttctcggtgattttcgctgttttgagtccttttccgccccggctttgggttctgtactcttcagccggagttcgttttccgtaccctttttcagtaacgataaggacgtgtgattcttcctctaatatctccatgccgacaacaacgtcgtcatccgtcagggtgatgccttttacgcccgccgcagttcttcccatctcccgaacatctgtttcagggaaacggatcagtaaaccgtttttcgttccaatgatgatttgttttgtgccatcagtcagacgtacacccatcagttcatcgtcttcacgaagactcagagcgattagaccattgttgcggatattagcgaattgagatagtgatgttcgttttgaaaccccatgctttgtagtgaagaaaaggtaaagctccgcattgaattccgtgactggaataatcgcgttgatccactcacccttttctacctccagcaggttaataatcgggattccttttgccgttctgccgtattcagggatttcatacccttttgcacgatacactttccccttgttcgagaagaagagaatcgtgtcatgagttgacgtagatatcaaatgttcaacgaaatcatcttcgtttgttcccataccttgtacaccttttccgccccgtttttgactgcggtaagttgatgcaggaagacgtttgacgtatccgttgtgcgtcagagtaactacgatattttctctctcgatgagatcttcatcttcaattgtctccagtccagaagtgacgatctcagtacgtctttcatcgttaaaacgctctttgatttccgtgagttcttcacgaatgatctcaagcactttatattcatttgccaagatgtcttttagctctgcaattaatttaacaagagattggtattcttcttcgatcttttcacgttccagtcccgttaaacgctggagcctcatgtcaaggatcgcttgtgcttgcttctctgtcagtgagaattgttcaattaaacctgttctcgcaatttcagccgtttgagaattacggataagggagataactgcatcgagatgatccagtgcaactctcaatccttccaagatatgagctctcgcttctgctttacgcaattcataagcagtacggcgtctaatgacaactttttggtggtcaaggtaatgctccaggcattgcttaagagttaaaactttcggctggccatcaacaagtgcaagcaggttgatgccaaaagatgtttgtagagcagtttgtttgtacagattgtttaagatgacatttgcattggcatcgcgtcttatttcaatgacaattctcatacctgtacgatctgactcatcacgcagatctgtgataccctctatctttttgtcccttacgagatcagcaattttctcaattaatttcgccttatttacttggtaaggtaactctgtaacgataattctttctttacccgaagatgtttgttcgatctcagcttttgcccggatcgtgatagagcctcggcctgattcgtatgctttccggataccgctgcgtcccaagatttgacccgcggtcgggaaatcaggccctggaatgacttccataagctctggaatggtaatgtccggattctcactgacagcaagtacaccgtcaatgatttctcccagctggtgaggaggaatgtttgttgccatacctaccgcaatgccggcagcaccgttcacgagcagattcgggaaccttgaaggcataacgacaggttctctttctgacccgtcatagttatcctggtaatcgattgtgtcttttgtgatgtcgcgaagaatctccattgagattttagacattcttgcttctgtataacgcatggccgccgctgagtctccgtcaacagaaccgaagtttccatgaccgtcaacgagcatataacggtagttgaaatcctgagccattctaaccatggattcatataccgctgaatcaccgtgcgggtggtatttcccgataacttctccaacgatacgcgcggattttttataaggcttgtcacttgtcatgcctaaatcattcattgcatacaaaatccgtctatgaaccggttttaaaccgtctcgaacatccggaagagcacgggacacgataacgctcattgcataatccaagaaggacgtacgcatttcctgactgatatttatttcacgaacttgtggtgtgttttgttcactcattaaaaaacctccctgaagtatcacatgaaatatgtgggagtagattgtccattatgaccttcaatacgatttcactattctccattatatcaataaacttatgattatacacattaaattgctagaatatataggtattgcaagcattgctgcatctgatcttgttcagaaaaaagccttatttcttattggaaataaggctttttatgattagatgtcaagatttttaacgtatctcgcattcgcttctatgaagtttcggcgcggttctactttgtcgcccataagcatttcaaaagtctcgtccgcatccattgcatcttcaagagttacctgaagaagtgttctggagctaggatccatggttgtctcccatagctgggtggcattcatttcaccaagacctttgtaacgctgcagtccaggcttaggcgtttgaggaagagtttttaacagctcttcaagctccttgtcattgtacgcatattcaacacgtttcccctgttgaaccttgtagagcggcggctgtgcaatgtacacgtagccattttcgataatttggcgcatatatctgtaaaagaacgttaacagcagtgttctgatgtgcgcgccgtcaacatcggcatctgtcataatgacaactttgtggtaacgggctttctcaaggttgaagtcttccccaatacctgtgccgagcgctgtgatcatagagcgaacttcgttgttagaaaggattttatccagtctggccttttcaacgtttaggattttacctctaagcggcaaaatggcttggaaatgtctgtcgcgtccttgtttagcagatcctccggcagagtcaccctctacgatatataactcggagatgctcggatcttttgaagagcagtccgctaacttaccgggcaggtttgaaatttccaaagcactcttacgacgtgttagttcacgggcttttttcgcagccattcttgctcttgccgccattaagcctttatcgacaatttttttggctgcatctggattttccagcataaatgtttccatcgccgtagaaaataacgtatcggtgatcgtccgtgcttctgagttgcccagctttgttttcgtttggccctcaaactgcggatcagggtgtttgattgaaataatcgctgtcagcccttcccttacgtcatctccgcttaggtttggatcattttctttaataagccctttttttctggcgtaatcgttgataacacgagtcaggcccgttttgaagccagcttcatgggtaccgccttcgtacgtgttaatgttgtttgtaaacgagtaaatgttgcttgtgtagctgtcattgtattgcaaagccacttcaaccgtaatgccgtccttttcgccttcaatgtaaatcggctcttcatggacaacctctttagagcggtttaaatactctacataacttttaattccgccttcgtaatggtattcatttttgcgctcttgtccttcacgtttatcctcaatcgtgatgtttacgccctttgttaaaaaggctaattcacgtacgcggttggcaagcagatcataatcatactcggttgtttctgagaaaatttcagggtccgggacaaaatgtgtcgtcgttcctgtatgatccgtttcgccaatgatttcaaggtctgtaaccggaactccgcgtttataagtttggcggtgaattttaccgtcacggtgaaccgtcacatcaagctctgttgatagtgcgtttacgacagacgcacctacaccgtgtaatcctccggatactttatagccgcttccgtcaaattttcctccggcatgaagtaccgtcataatgacttctaccgcaggacggcccattttttcatgaataccgactggaataccgcggccattatctacaaccgtgatactgttgtctttttcgatttggatattgatatccgtacaataaccggcgagggcttcgtcaatactattgtcgacaatttcccataccaggtggtgaaggcctttgctgtttgtcgaaccgatatacatccccggtcttttacgaacagcttccaatccttctagtacctgtatctgattttcatcataactgttttgctgctgttccatagccacgtcattcacctacacttttctaaacgatatattcgtgataaaaaatttctaagaatctatttcaaacataaattgcgcacgtttttttaatgtgctggaagataagggagagtaatatatattctgaaccgtgactacgatagatttgggcgtgccgtttacggaaggcaccaccttgtgtttctgttttttcagaaattcttcaacaataggcgacatgttggctttaaagtcaaaaatgccgacaatatctcgtgttgaaaccacaaagtcatcacctaaatgaatatacaattgctcacctcatttcttcacttcactaacgcaccattttgcacacggaacattcctgcttgacgtaaggtttcgtgatcaatgccatcaacgcttgtcgttgtgacaaacgtttgtacacggccttggatcgtatgaagcaagtgtgactggcgataatcatccagttcactcagtacatcatccaatagtaaaatgggatattctccgatttcttcatggatcaggtcaatctccgccagcttaagggacaacgccgtcgttcgctgctgtccttgagaaccatacgtctgcacatcgcgtccgttcacatagaaaagaacatcatcgcgatgaggccctgacagcgtcacaccacgctcaatttctttttctcttaatttagaaaacgcttcttgatagctatctcctattttcgacaaatctaggggatctgatacatcaagagctgtatggtatttcagggtcagttcttcaagccctcttgagatgcctgcatggatgggctgcgcccatttctcgagctgtgctgtaaactgcaggcgttttacgacgacttttgctgcaacttctacaagctgatcggtcagaacatcgagcatcgtccggtcagtttgttttcttgtttgcagctgtttcaaaaaatgattccgctgggaaaggattttctggtaaagagaaagatcatgaaggtagacgggagaaacctgtccgatttccatgtcaagaaaccgccttctcacttgagggcttccctttacaagatttaaatcttccggcgcgaacataatggtgttgagggccccgacatactggctgagcttttgctgttcaatatgattgaccttgccctttttaccctttttggagatgacgagctgcatcgggatcgccccgttttgcttcatcactcttccctctattttagcatagtctttgtcccaccgtataagttctttgtcatttgatgtccggtgcgatttcgccatggacaagacatagatcgcctccatgaggtttgtcttcccctgggcgttttctccgatgatcacatttactttattttcaaattgaagttcagcatggtcgtagttgcggtaagatgtcagttctaagttctggatatacaatcagtgtcacccgctttaattgacgacttgaaatgaaccaaatccttcaatctctaccacatctccaacatacagctttctgccccggcggttgtccggctcatcgttcacaagcacttcatgctcgcttaaaaaccacttcgccataccgccagactgaatcacatcggctaattttaagaattgtccgagtgtaatcatctctgtatcaattgaaatcggatttgccattatatcgacctctttcaaatatcactaatatctaattgtactaaaaaaaaacgaattagggaaagggaaaacttgtcggagcagataccgaatagaaaagctgccgacgggtcggcagcagtgtatcggattaataggttctgacaggaaggataagctgtacaatcgtttcatcattcggcgtgcgaattaagaaaggtctcattgcgcctgtaaagcttacgcgtatttctgctccttcaagcacctttagtgcatccagcatatattttggactaaaagagatatttaattcctcaccttcaatttgatccgcaacaattgcttccacaactttaccgatttctggcgaattggaagaaatttcaatggattcagccggttttgcggacagttttacaacgttgttgcgtccctctctagctaaaagagatgcacgatcaatggcctgaaggaattcttttgtgttcacaatgatttctgttttgctgtcttgcggaatcaggctggttgtgtctggataattcccgtccagaagccgtgagaagaataagacgtttttcgctttaaacagaacttgggtttctgtgatgacgatatctacaagttcctggttgtcatctaaaatcttgctgagttcagttaaactttttcccggaattacgacgttataagatctgtcttctggaatatcaagtttcgcctttcttaatgcaagacggtggctatccgttgcagtgcataataattcactttgctccactttccagtttacacctgtcaagatagggcgtgtttctgaggtggacaccgcaaatactgtttgtctgattagattttttaacaaatcagttgggatctgaatcgcatgatgctcttcaatctgcggcaagtgcggatattcatcagcatccagtccgtttagattaaattcagctttaccagaacggataatcgtcaaatactgattttggacttcaatttctacagttgccatcggcaatttttttacaatttcactaaaaaagcgagcctgtaaaacgatgcttccgggctgttcaatagtgacgatttctttatctccttcttcttttggaatgaaggattcaatagaaatatctgagtcactccctgtaaaggatactccatcatctgatgcaacaattttaataccagtcagaatgggaatcgtggttctggatgaaactgcttttaatacatcttggacactttcaacaagacgatctttttgaatcgtgaatttcatttttatcctcctaacggataatgtattaatatatatatttataaaaaatagtagaagtaatagtagggcctgtggatttgtggataagttgtgaaaaagacaggaaacacagcctatccacatgtggacagactgtgtatgacttccgaaaagttattcacactttccccgattgatccccggtcctgctatttaagctgttctttaatttcttttacatgctgctgaagctgttcatcatctgccagcagttttgaaattttttcatgcgcatgaataacggttgtatgatcacgtcctccaaactcttcaccgattttaggaagagaggaatcagtcatttcccttgataagtacatggcgatttgacgcggaaaagctactgactttgtccgtttttttgctttgaaatcctcgagtttaatattaaattgctggcctactaccctctgaatttccttaatcgtaatgactttcggttttgaggaaggaataatatctttcaatgcctcagcggccagatcagcattaatatctttattaattaaagatgaataagcgacaactctgattaatgccccttcgagttcccgaatattgctgtcgatttgattcgcgatgtaaagcataacctcgtttggaatatcgaggccctctgctttggccttttttcttaaaattgcaattctcgtttctagatcaggcggtgtgatatctgtaataagtccccattcaaaacgtgagcgcaatctgtcttcaagtgtcggaatttcctttggcggccggtcacttgaaatgacgatttgtttgctttcttcgtgcaatgtgttaaatgtatggaaaaattcttcctgggtttgttctttccccgctaaaaattgaatatcatctatcaaaagcacatcaacatttcgatagcgattgcggaagtcgacggctttattatctcggatagagttgatgaattcgtttgtaaatttctcagaagacagataaaccactttggcagaaggattatgatctattacataatggccgatcgcatgcattaagtgcgttttccctaagccgacgcccccatagataaataaagggttgtaagctttcgcgggtgcttccgctactgcgagggaagcagcgtgtgcaaatcggtttccagatccgatgacaaaagtatcaaaagtatattttggattgagcatattttgaggaaaatcagatgtatcttctttgaccgcttttttgacttgcggtttcggcataaagtcctcaacatcttgattttgaggaatgacaaacttaatgctcaattcttccccggttaattcatatatagtatctgcaatcagatgcaagtatctggactccagccagtctctggcaaattcattgggagccgtgattgttaatgtatcgccttgcagtgagtgggctttggttgacttcatccaagtctcaaaactcggtttgctcaactttttttcgatttgagcaagggcttggttccacaggtctaatatattttccatcttccggcacgtccctccttttcttagaaaatggcgtctttctctgttatagaacacaaaaaaagagcaaatggcgcttaccattcgtacacattaaatgttgaaaacatataatatagtagataaatagcttttcgacaaatttcacaacttgtggacaaccttctacacaagctgtgtgaaatcaatccacaacttatccacactttgtggataaagaggaaaggtaggattagtaatcaagagttaaaacacaaatataataccaaaataaacgagagcttgcaatggttgtcacaatcttatccacaaagcggacaacctgttgaaaaaaccttgtccacaggggttggtaatgtgaaaatgttgtcgataacctctgtggatactaaaaaaagccgaaaaagatatccacatgcgtgattttaggggcaaattgtttgaatttgtcttttttccgtaaaattaaggaatctaaaaaataaggtttcgaaagttgaaaaggtatggtatcctattatggttgcaagaaataaaagcactagtgaagttgacaatgaataggtaacgcaaatataataagtaagactgtctttaacagctattcctcgagggaggtgtcataaatgaaaagaacattccaaccgaataaccgtaaacgcagcaaagttcatggcttcagaagccgtatgagttcaaaaaacggtcgtctagttttagcacgccgtcgccgcaaaggcagaaaagtattatcagcttaggccactgaataatgtcagtggtcttttttcacgttatgggaaaagatagatgtgatgcgtaatgaaccggggcatgcttcctggttcagatgcatctcatgttcataataaattttaaaagtttctgccagccagtatcggagtgagtcatttgaagaagcgaaatcgtttaaagaaaaatgaagattttcaaaaagtgtttaaacatgggacatcagttgcaaaccgccagtttgtcttatatacgcttgatcagcctgaaaatgatgaactgcgtgtcgggctttccgtcagcaaaaaaattggcaatgccgtgatgcgaaatcggatcaaacgtttgattcggcaggcctttcttgaagagaaagagagactgaaggaaaaggattacatcattattgccagaaaaccggcgagccagctgacatatgaggaaacgaaaaaaagtctgcagcatctattcagaaagtcttcattatataagaaatcttcgtcaaagtaggcatcaccactgctttcttacaacttttaaaagcgcttcctttctggttgatcagaaaaagacaccatttaaaactgaaagatgctaaaatacatacaagtatgctttgcaataaaagagtgtaaagattaattataggaggaaatgttgttgaaaaggagaatagggttgctattaagtatggttggcgtattcatgcttttggctggatgctcgagtgtgaaagagccgatcactgcagatagtccgcatttctgggacaagtacgtagtatatccattgtctgagcttattacgtatgtagcgaaattgacgggagataactacgggctttcaattattctagttaccattttaattcgtttattaattttaccgctgatgattaagcagctgagaagttcgaaagcgatgcaggctttacagccggaaatgcaaaagcttaaagaaaaatacagctcaaaggatcaaaaaacgcagcaaaagcttcagcaggaaacaatggctttattccaaaaacatggtgtcaatccattggcgggatgtttcccgattttgatccagatgccgattttaattggattctatcatgcgatcatgagaacacaggcgatttcagagcacagcttcttatggtttgacttaggagaaaaagatccttactatattcttcctatcgttgccggtgtcgctacatttgttcagcaaaaactgatgatggctggcaatgcgcagcaaaatccgcaaatggcgatgatgctttggattatgccaattatgattatcgtatttgcgatcaacttcccggcggctctttctctttattgggtagtcggtaacttgtttatgattgcgcaaactttcctcattaaaggacctgatattaaaaaaaatcctgagccgcaaaaagccggaggaaagaaaaagtgaggaatgtgactgctgcagggcgaaatgtcgatgaagcagtacagtccggattgcaagagttgggattaacgaaggataaggtagaaattactgttattgaagagggaaacaaagggtttctcggtattttcggtaaaaagcctgcgatcgtaaagctggttgaaaagattgatccgattcagcaagcgaagttatatcttcaaacgattgccgaagccattgccgggaagtctgatgtgactgttcaagaaagcaaaaagacagtgagatatcatataacaggtgaaaaggcagcattgttgattgggaaaagaggacaaaccttaaacgcccttgaaactttgacacagcttgcccttaaccgttatccaggccaatataaaaatgtgacggtggatgcagaaaactatcgtttgaaaagaaaagaaacactgagccagctggccatcaagcttgctgaccaggttttgaaaacgaaaaaatccatccagcttgagcccatgccgtccagcgaaagaaaaattattcacgatactctttctggatatgcaaaccaccagatcaaaacatattcaatgggtgaaggcgaaaatcgtcatctcgttatttcccataaaagatagcataaaaccgaagtccgataaaaattggatttcggtttttttgtatccgaaaaatctacttttcctagtaatatcaaggttttgccgtttaagttttttctttttaggtgtatcctgttgataaaaaggaagttcaggaaataaaattaattgttattcacatgtggataagttaaagtaataagggacgaatttctatttctgtggataacaaatcttccacttcgaaccaaactatgttatcttttagttttggcataataaaaatttttttatatagatgaagtataagtaaagagaggtgaacaacatggatacaattgcggcaatttctacaccgatgggagaaggcgcgattgcgattgtacggttgagcggaccagaagccattcaaatcgcagatagaatttataagggaccgaaggggaaaacactcagctcggtcgaatcacatacgattcattatggtcatatcgtagacagaccttcggatcgtgtcgttgaggaagtaatggtatcagtgttaaaagcgccgagaacttttacacgggaagatgttatcgagataaactgtcacgggggaattgtgactgtgaaccaagtgcttcagctcgcattgagagagggagcgagactggcagagcctggcgaatttacgaaacgtgcgtttttaaacgggcgtatcgatctttcacaggcggaagcggttatggacttaatcagagcgaaaacggaccgggcaatgaacgttgctatgaatcaaatggaagggcgtctttctgctttggtgcgccgtttgcgcagtgagattttagaaacactggcccatgttgaggtgaatatcgattatccggagtatgatgatgtagaggaaatgacgcatcagattttagtcgaaaaggcaaccgccgtgaaaaaggaaattgaggcgttgctgaggacttctgagcaaggaaaaatcttgcgtgaaggtctttctaccgtcattattggccggccaaacgtaggaaaatcatctcttctgaacagcctcgttcatgaggcaaaagccattgtaaccgatattcccggaacgacgcgggatgtgattgaggaatacgtgaatgtaaggggcgtcccgcttcgtctggttgatacagcaggtattcgtgaaacagaggatattgttgagcgaatcggtgttgaacgttctcgccaggtcctaaaggaagcggacctgattttacttgtgcttaattatagtgaagagctttctgaagaagacgtgaagctttttgaagccgttgagggcatggatgttatcgtgattttgaataagactgaccttgaggcgaagattgacactgaacgtgtccgtgagcttgccaatggacgtccagttgttacgacatctcttttaaaagaggaaggcatcaatgatctggaagaagcgattcaatcactgttctacacgggtgccattgaaagcggtgatctgacttatgtcagcaacacacgtcacatctctattttacagcaagcaaaacgcgccattgaagatgcgcttagcggcatcgaacaggatgtcccgatcgacatggtgcaaattgaccttacaagatgctgggagcttttaggggaaatcattggagattctgtccacgaaagcttaattgatcagctcttttctcaattctgtttaggaaaataattaaaggaggaactagaatcatggggtatgaagcaggccaatacgatgtgattgtgattggcgccgggcatgccggtgttgaggctgccctcgcatctgcacgccaaggcgccaaaacgcttgtcttgaccatcaacctagatatggttgcatttatgccatgtaatccgtctgtcggcggccccgcaaaagggattgtcgtccgcgaaattgacgcgctcggcggagaaatgggaagaaacatcgataaaacacatattcaaatgagaatgctgaatacaggaaaaggtcctgcggttcgtgcattgcgtgcgcaagcagacaaattccaatatcagcacgaaatgaaaaatacgcttgaaaaagaaccaaacttaacattgctgcaaggaattgtggagcggctgatcgttgaagacggcgaatgccgaggcgttattacacaaacaggcgcacattatcgtgcgaaagcagttgtcatgacgacagggacatatttaagaggacgtatcattcttggcgatctgtcttactcaagcggcccgaataaccagcagccttctattaagctttctgagcatttggaggaactcggttttgaccttgttcgttttaaaacaggtacgccgcctcgcgttaaaagcgacacgattgattacagcaaaacggaaattcagcctggtgacgatgtgcctcgcgctttctcatatgaaacagtggaatatatcacagatcagctcccttgctggctgacatatacaagccctgagacacatgagattattgacagcaacctgcaccgttcaccgatgtattcaggtatgatcaaaggtacgggcccaagatactgcccatccattgaagacaaagttgtccgttttaatgataaaccgcgtcaccaaatcttccttgagccggaaggcagaaatacacaggaagtctatgtccaaggtttatctacaagtcttccagaagacgtacagcaaagaatgcttgcaacgattcctggacttgaaaacgtgcaaatgatgagagccggctatgcgatcgagtatgatgcaatcgtaccgacacagctatggccgacacttgaaaccaaaaaaatcacaaacctttatactgcaggccaaattaacggaacatccggttatgaagaagctgcgggacaagggattatggcgggaatcaatgcaggacgaaaagcgcttggaaaagaagaagtaattctaagccgttctgacgcctatattggtgttctgattgatgaccttgtgacaaaaggtaccaatgagccatatcgtcttttgacatcacgtgcggaatacagattgctgcttcgccatgacaatgctgatttgcgtctgacagaaatcggacatcgcattggattgatttctgatgagcgctatgcggcttttgagaagaaaaaagcggcgatcgaggcggagaaaaaacgtcttcattctgtaattatcaagccgtctccggaaaatcaagaatatatccgatctcttggcggaagcgaattgaaagatggagttcgcggcacagacttgatgaaacgtcctgaaatgaactatgaaacagtcacaaaactggcgccgccagaagtgccggttcctcaagacgtggcagaacaagtagaaatccaagtgaaatatgaaggatatattgaaaaatctcttcagcaagtggaaaaactgaagaagatggaaaataaaaaaattccagaccgaattgattatgacgcaattaaggggattgcgaccgaggcgcgtcaaaaactgaaaaatgtacggcctttgtctgttgcccaagcttcccgcatttccggtgtaaacccggcggacatttcaattctattggtgtatttagagcagggacgcattgcgaagatagccgaatagaaaggatgacggcatgaatattgaagaatttacttctggtttggcggaaaaagggatctccctttctccccgtcagctagagcaatttgagctgtattacgacatgctggttgaatggaacgaaaaaatcaatctgacttcaataacagagaaaaaagaagtgtatttaaagcatttttatgattccattacagctgctttttatgtcgacttcaatcaggtgaacacgatttgtgatgtcggagcgggagcgggttttccaagtctgccgataaaaatatgctttccgcacctcaatgtcacaatcgtagattcactgaataaacggatcacgtttttagaaaagctatctgaggctttgcaattggagaatacaacatactgccatgacagagctgaaacgttcgggcaacggaaagacgtgcgtgaaagctatgatattgtgacagcgcgagcagttgcgagattatctgttttgagtgagctttgcttgcctctggtgaagaaaaacggtttatttgttgctttaaaagccgcatcagcggaagaagaactgaatgcaggcaaaaaagcaatcacgacgcttggaggagaacttgagaatatccattcttttaagctgcctattgaagaaagcgatcgtaatattatggtgatacgcaaaataaaaaatacacctaagaagtatccaagaaaaccgggaactcctaataaatcgccaattgaagggtaatttagacagcctgatatgacaataccatcatattttcatcaaaattgatggatgtacagcaggaaaaaccatgagaaaatagaattataaaaatggcagtttttaaaggtggtgtaggtacatgaagcattcattctctcgtttcttcgggcttggtgagaaggaacaggagccggagattgctgaacatgatacaaacaaagaagagattctggaaataccggtaaatgctatcgttcccaaccgttttcagccacgcaccattttctcagatgaaaaaatcaaagagttagcaatgaccattcatacacacggcattattcagccgattgttgttaggcatacagaagaagaaggccaatacgaactcattgcaggtgaaagacgctggagagcggtgcaatcgcttgagtgggaaaagattccggcaattattaaggatttttccgacacggaaaccgcttctgtggcgttaatcgaaaacttgcagcgggaagaactgtcttctattgaggaagcgcatgcttatgctaggctgcttgagctgcatgatttaacacaggaggcactcgcacagcgcttaggaaaagggcagtctacaatcgcgaataagcttcggttattaaagctgcctcagccggtccaagaggcaattatggagaagaaaatcaccgagcgccatgccagagcactgattccgctgaaacagcctgagctccaagtcacactgctcacagagattattgagaaaagtttaaatgtaaagcagacggaagaccgcgtggtgaaaatgctggagcaaggcaagagaaagccaaagccgagacgcaaagcattcagcagagatacaagaattgcgatgaacacgattcgccagtcactatcaatggtggaagacagcggtgtaaaattgaatacagaagaagaagaatttgaagaatatattcaattaacgattcgcataccaaaatagaagctctcctgaaaagcaggagagctttttatattttcaataaaaggtaatcacttacttttagtgaaaattattatattagaattcttttctttgagtttgtggataaactcttcagatttttgcggtgaaattactgcatgtccccatccctcctgataatatattgtgatggcatggcgagagccgatcagacgaaaaccggaccatagtttctttttttgaacgactttatcgattttttcataaggaatttgatgtttgatcaatccggctttaatgatcagatggtgttccttcaatacatattttaggtcaataaagctccaaatgatgagtccatttaaaagagtcagcagaataaaaatgatccagccggaaactctcatatttcccagcacaaaaggaacaatggcatctgcttgtatcagtaatatgagaaacacaatcatcagcgtaacgggtacatctctcttcgtttgataaaccattttctcaccatcctgtttccacgttctgtactgtgacttcttctttttttctttaagaaattccttttttaagtcaaaaaaacatagaaattgcagaatttataagagaaagcataaagcgtgcttgaattttcaattatttcccttctgattcggaacaaaatgatgaaaaaaatgaaacgctttaatctttttttgatagaatagaagcaagatagtacatgttcatgtgaaagtaggtgacatcgtgggaaaaatcatagcaattacgaaccaaaaaggcggggtcggcaaaacaacgacgtctgtcaaccttggggcatgtttggcttacatagggaaaagggttctgctggtagatattgatccgcagggaaatgcgacaagcggattagggattgaaaaagccgatgtagagcagtgtgtgtacgatattttagtagatgatgcagatgtaatagatattattaaagcaacgacagtagagaacttggatgtgattcctgcgacgattcagcttgcaggggctgagatcgagctggttcctacaatatcaagagaagtgagattgaagagagcgcttgaagcagtaaagcaaaattatgattatattatcattgattgtccgccgtcattgggcttgctgacgattaacgcccttacagcctcggattccgttgtgattcctgtacagtgcgaatattatgccttggagggtctcagccagttattaaatacagtacgtcttgtgcaaaagcatttgaatactgatttaatgattgaaggtgtattgctgacaatgcttgatgcccggacaaaccttggcattcaagtgattgaagaggttaaaaagtattttagggataaagtatataagacagttattccgcgtaatgtccgtctgagtgaggcaccgagtcacggaaaacccatcattttatacgatccgcggtcaagaggtgcggaagtatatttagatttagcaaaggaagtggctgcgaatggctaaaggccttggaaaagggattaatgcgttatttaatcaggtagatttgtctgaagagacagttgaagaaattaaaattgccgatttacgccctaatccttatcagccaagaaaacactttgatgacgaggcattagctgaactaaaagaatctgtgctgcagcatggcattcttcagccgcttatcgtcagaaaatctttaaaaggctatgatattgttgcgggtgaacggcgttttcgagcggcaaagctggcaggtttagatacagttccggctattgtccgtgaattatcagaggcgttaatgagggaaattgctctattagaaaaccttcagcgtgaagatttatctccgcttgaagaggctcaggcatatgactccttgttgaaacacttagatctcacacaagagcagctcgccaaacgtcttgggaaaagcagaccgcatattgcgaatcatttaagactgctgacactgccagaaaatattcagcagcttattgccgaaggtacgctttctatgggacatggacgcacgctccttggcttgaaaaacaaaaataagcttgaaccgctggtacaaaaagtgattgcggagcagcttaatgttcgccagcttgagcagctgattcagcaattgaatcagaatgttccacgtgaaacaaagaaaaaagaacttgtgaaagatgcggttctaaaagaacgggaatcctatctccaaaattattttggaacaacagttaatattaaaagacagaagaaaaaaggcaaaatcgaaattgaatttttctctaatgaagaccttgaccggattttagagcttttgtctgaacgagaatcgtaaatgaagaaaccatctttcaagcaaagatggtttttgttttatatgcgcccagtgagtctttgcaacgggttaaggcgttcttgcctccactctgtccgatctgttaaactcaatccttccgcgagaacattggccatattcatgaccaagttgagtctagtattttgcaatacaaaatattccataaaaccgctcacattcacgattccgttaatatgaagatctcccacttcaggaaggtctttttgtacaccggcgccgggctttaatggcccgtccccgatttgaaatgaacccacactcttaacgcggcctaagcatgcatcgactgctataataaatgggtttttatgtaatttatgaatgtcattgattttatccttcatgttcacagcatggacggggtcagataaggttccgtagacatggaatctggtgagctgcatctgtttgagtttcattcctacgagcgggcctaatgagtcaccggttgaacggtctgttccgatacaaaccacgacaattggtttgccggcagctttacgtaaggatgaagaaaggatggtttggatttgttttgccgctgcagcatctgtatgtgaaacatattgctttactcgttcctgagaggaaaaaagcccgccttttcgattcatgggtttcacttccttgttatagtaggtaacagaattgctatggtgtgtgtagttatgtaaggttgtttacagtatatccagcagtatggttttttatgctttgtgtatggcaccggagattttaaaaaagtagagggcatgatatgaatggttagtgggcgattacaagtattgtccctcattgcctcgatcatgatcaagcaattgtctgcttatgaaacacttgaatagataggaatggttagaaaaaagtgaagagtgaagttcacttcttcattccgcggacaaacaaataaatatctctttttagactgccgcattagcagtctttttttatgtgtatttcgtatgataatttcagcttgtgttcaaatgtctatgaaaatatggcatttttgctttcctttatttatatagtaacaataacgggaacaagctgaactttgtctatgaggtgatagtgttgtggagagccggaatgaagtggatgctgctcatattagggagcctgatcggggccggatatgcgagcggtcaggagatatggcagttttttggggcggaaagcggacttgctattgtgctgtttacaattatgttcattttctcgtcttatattgtgatgaaaatcagttttaaagttcaatccactcattttctgccggttctggagcatttaatggggccatggctggcgaaaatttatgatgtcctcatcattttttatttgttttcgacgactatggtgatgattgccggaggcggtgtgaccctgcaaatgtacaagcttcctttctggtggggaatcacgctgatttgcatcgtgacagtgtgtttgtttttgtgggatgtgaaaggaatattatctataaatagtattttgattcctgtgttagtagcggggcttttatatgcgctgatctcctttcagagcacacatcaccatacgtggatgattgatttgtcccagcagtataactggcctgcgagcattacgtttacctctttaaacatcctttcagttgttgcgattttatcctctgttgggaaagagatgaaagggctcggagaagcaaaaatcgcaagtgtggcaagcggtcttatttttggcgtgatctcatttgtttataatgaaacgttggtggagctggcgggctccctttctcagtttgaaataccgctgtttgccgttctggagggtgcgccttatttcctttttttatgtatgacggcggtgctgtgcctggcgatttacacgacgacggtagcaggtttgctggggctgtccagccggctgatggcgtttattcatatgccgagatggatgattgtgttgattttgttagtgttaatggtaccttttacttctttcggattttctgatttgatcgcgttcttgtatccgatatatgggatgctcaatttgtatttgttagtttgtctgctcttatatcctattttgagtaaatggaaataagaggatgtatttcttttcgggtatcttgattgctcttatgatcagtttttttgtacaatagatacagcagtttaggaaaagaggtgaagggtcttggcggataaagactttggcctgaatgatatcgtagaaatgaaaaaaccgcatccatgcggagcgaacagctggaaaattatacgcatgggaatggatattcgaattaagtgtgagggatgctctcacagtgttatgattccgagaagagaatttgaaagaaaactaaaaaaagtactagtcaagcatgaggagcctacttcataaataggccgacactcatgctttttcatatagaaggtaaggagaagacggcgatgagcaaagtgcatcagtcggcatgtccgctgaattgttgggacagctgcggctttttggtgactgttgatgatggaaaggtaacaaaagtggacggagatccaaaccatccgattacggaaggtaaaatctgcggccgcggcagaatgcttgagacaaaaacaaattcgcctgatcggcttcgctatccaatgaaaaaacaaaatggcgagtttgtgcggatttcttgggagcaggcacttgatgaaattgccgataaacttcgggaaatcaaggaaacgtcggagacgactgctgttttgcacagccatgattatgcgaataacggtctgttaaaagcgcttgatcagcgtttttttaatggatatggcggcgtgaccgaaatcgtcggaagcatatgctggggctccggtatcgaggcgcaaagctgggattttggccgttcgtacggtcacggaccgcttgatatttacaacagcaagcatgttgttgtgtggggaagaaatgtatcaagaacaaatatgcacttataccatcacttgcagcaggtgaaaaagaagggcgccacgattacggtgattgatccgatcttcaacccgactgctaagcttgccgaccgctatatctctgtaaagcctggaatggacggctggcttgcggcagccgttttgaaggttctgattgagatgggaagaacggatgaaacgtttatttctgagcattctgtcggttttgatgatgtgaaagagcttttgaagaccgtttctctggaagagtttattgtgaaaacagaaacttctatggaggatctggagtatttggcaggtttgtatgctgatggtccggtgtctacttttatggggcttggcatgcagcgatataaaaacggcgggggaacgattcgttggattgatgcacttgtggcggcaagcggaaatgtcggaattaagggcggcggcgcgaatttcggaaatgtccagattggtgagagctttgcaaaaacaaagctgacgctgccggaattaaaaacaacatcccgttctttttcaatgatgacacaggctgaagaagtgttgaccgctgctgatcctgcgattgagatgattattgtgacgtgcggaaatccgctgactcaggtgccgaatacaaataaggtgagacaagcatttgaaaaggttccaatgacggtcgcgattgattccattatgacggataccgcagagctgtgtgattatgttttgccgactgccactgtttttgaagaagaagatatctactattccagtatgtatcatcattatgttcagtacgggaagaagcttgtggagccgcagggtgaagcgaaatcggacagctggatctggtcagagcttgcaaaacgtcttgggtttggcgagctgtttgaatacagcactcaagaatttttagagatggggctttcttcattggaagcagaggatgtgacacttgagcgtttaaaagaaaaaggccacctccctcttccagtaaaacaggtgccgtgggatgattatcagtttttgacgccgagtggaaaatttgaatttacttcgtcgctagctgagcaaaaaggatttagcggctcgcttcaattaaatgtgcccgaagaatctgttttccataatgaggagttagctggaaagtacccttatacgctcttatccattcatccgcagcgttccaatcattcacagcatgtgccgtttattgaaaagcttcagcacgttcaggtcgatatttctccagatatagcggctgggcaggatcttcaggatggagacgaagttgtcatctttaatgaccgcggaagcatgaagggcaaggtgaaagtgatgaagcaggctcatgcgaagacgattaatatagatgaaggcatgtgggcggcttttggagggtcagtcaatgcactgacaaatgatacaaattctgataatggaatgggaagtacgctttttgactgtttagtaggcttgaaaaaagcataatcaaagggattggcaagctgaaaatgcttttttgtcagcttgtcttttccagtgaacctccttataattgctctaggttcaaaatacgttcatacaatgacggttttatatagaggagatgaaagaatggctttaacagctggaattgttggtttgccgaacgtcggaaaatcaacactatttaacgcaattacacaggccggtgccgaatcagccaactacccgttctgtacaattgatccgaacgtgggaattgtagaggtaccggatgatcgtctgcaaaagctgactgagctggtcaacccgaagaagactgtgccgactgcttttgaattcactgatattgcagggattgtaaagggcgcatctaaaggagaaggactcggcaacaagttcctatctcatattcgccaagttgacgcgatttgccacgttgtccgtgctttttccgatgacaacattacacacgtttccggaaaggttgatccgattgatgacattgaaacgatcaaccttgagctgatcctcgctgatatggaaacggttgaaaagcggattacacgcgtcagcaagcttgcgaagcaaaaagataaagacgctgtatttgagtttgagattttatctaaactgaaagaagcgtttgagagtgaaaagcctgctcgatctgtagaattcactgaggagcagcaaaagcttgtgaagcagctccatttactgacttcgaagcctattttgtacgtggccaacgtaagtgaagatgaagttgctgatccatctggcaatgaaaatgtagcgaagattcgcgagtacgctgccggcgaaaacgcagaagttatcgttgtatgtgcaaaaatcgaatctgaaatcgctgagcttgaaggcgaagaaaagcaaatgttcttggaagagctgggcattcaagaatcaggtcttgatcagctgatcaaagcgtcttactctcttctcggcctcgcaacatatttcacagccggagaacaggaagtcagagcttggacattcaaaaaaggcatgaaagcacctgagtgtgcaggaattattcatagtgactttgagcggggcttcattcgtgctgagacagttgcttatgaggatcttcttgcgggcggcggtatggcaggagctaaagaggcaggaaaagtccgccttgaagggaaagaatatgtggtccaagacggagatgttattcatttccgatttaatgtataggatgcagttgtaaagggacaagagctttggtataatataaaattgtgagtaatagaattattgctccttgcccattatgggccgcttagtccaaaaggaggtgcaaacagatgagaaagtacgaagttatgtacattatccgcccaaacattgacgaagagtctaaaaaagcagttatcgagcgtttcaacaacgttctgacttctaacggtgcggagatcactggaacaaaggattggggtaaacgtcgtcttgcttacgaaatcaacgatttccgcgacggtttctaccaaatcgtaaacgttcaatctgacgctgcggcagttcaagaatttgaccgtctagctaagatcagtgacgatatcattcgccacattgttgttaaagaagaagaataagcaattttgaaatatataatggtaaaaggtggtctttcttatgcttaaccgagttgtattagtcggaagactgacaaaagacccagagcttcgttatacgccaaacggtgcggctgttgctacgtttactcttgctgtgaatcgtacatttacgaaccagtccggagaacgtgaggccgatttcattaattgtgtcacttggagaagacaagccgaaaacgttgcaaacttcttgaaaaaaggaagccttgcaggcgtagatggccgtttacaaacaagaaactatgaaaaccagcaaggacagcgtgtcttcgtgacagaggtccaagctgaaagtgttcaatttcttgagccgaaaaacggcggcggttctggttcaggtggatacaacgaaggaaacagcggcggaggccagtactttggcggaggccaaaatgataatccatttgggggaaatcaaaacaaccagagacgcaatcaggggaacagctttaatgatgacccatttgccaacgacggcaaaccgattgacatctcggatgatgatcttccattctaatgtgattatcacctaaaatgaaaaagaaaggagggaaatgacaatggcaggaggacgcagaggcggtcgtgcgaaacgccgtaaagtgtgttatttcacttctaacggtatcacgcacatcgactacaaagatgtagatcttcttaaaaagtttgtttctgagcgcggtaaaattttaccacgtcgtgtaactggaacaaacgctaaataccaacgtaaattgactgcagcgatcaaacgcgcacgtcaaatggctttacttccatacgtaagcggtgagtaagctgatacgtaaagagcaaggaccttcgggttcttgctcttttttatagggggaggatgaaacatgaagttgatttcatggaatgtaaacggcctgcgggctgtgatgagaaaaatggatttcctctcttatttgaaagaagaggatgcagatattatatgtcttcaggaaacgaagatacaggacggccaggttgatctccagcctgaaggctatcatgtgtactggaattatgcagtgaaaaaaggatattccggcacagctgttttttctaagcaagaaccgctgcaggtcatttacggtatcggagtagaagagcatgaccaagaaggcagagtgattacgctggaatttgaaaacgtgtttgtgatgactgtttacacgcccaattccagaagggggttagagcggattgattaccgcatgcaatgggaagaggctttattgtcttatattcttgaattggatcagaaaaaaccagtgattttatgcggtgatttgaatgtagcccatcaggagattgatttgaaaaatccaaaggcgaaccggaataacgctggattttcagatcaagaaagagaggcattcactcgtttcttagaagctggctttgttgattcttttcgtcatgtttatcctgatcttgaaggcgcttattcctggtggtcgtatcgtgccggcgcccgggacagaaatattggatggcggattgattattttgttgtttctgaaagccttaaggaacagattgaagatgccagcatatcagcggacgtcatgggttccgaccattgtcctgttgaacttatcatcaatatatgatgagatagcagtaaggattttacacttactgctttttttatatgaaaaggagaaagagatggcaaatataaaagagatcgcaagactggcaaatgtatctgtttcgactgtctcgcgtgtattgaatcatcatccgtatgtgtctgaagaaaagagaaagcttgttcaacaagtcatgaaggatttggattatacaccaaatcgaaccgcaatcgatctcattcgcgggaaaacccatacggtcggtgtgattctgccttatagcgatcatccctgctttgataaaatcgttaacggaatcaccaaggcggcttttcagcatgagtatgcaacgacccttctccccaccaattataaccccgatattgaaatcaaatatttagagctgttaagaacgaagaaaatagacggtctcatcattacttcccgcgccaatcattgggacagcattttagcttatcaggaatatgggccagtcatcgcttgtgaggataccggagacattgatgtcccttgtgcttttaatgacagaaaagctgcttatgcagagagctttcgctatttaaagagccgcgggcatgagaatattgcttttacgtgtgtcagagaagctgataggagcccgagcacggctgataaagctgcggcctataaagctgtctgcggaaggttggaagaccgccatatgctgtccggatgcaacgatatgaatgatggtgagctggcagctgaacatttttatatgagcggacgggttccgactgctatttatgcaaatagtgatgaagtggcagctggaattcatctatttgccaaaaagaataattgggatgttgaaatcataggcgagggaaatacttctatcagccgtgttcttggttttccgtcgcttgatttgaatcttgagcagctcggcatcgcagcattttctctatttttgcaggatgaacccgctgatatcaaaattcagcataaatttaagaaaaaagcttgaactgaaatgcatttcataccttataacttcattgaaggcgaaggaggaggaagaaatgcagattgaacatacagcggtctgggtcaatgatttagagcgaatgaagtctttttatgaatcgtattttaatggcgaagcgaatgatttgtatcataatgagaaaaaagattttaagtcttattttattacgtttgattccggagcaaggctggagattatgaaaaaagggaatgtgaccgatccgccctcacaaacaatgacaggctgggcacatattgccttttccgttgggagccgggagaaagttgacgaactgactgatcgattgaaggcggatggtttcgcagtagtaaacggcccgaggacaacaggagacggctactatgaaagtgtgattgaggatgatgaaggaaatttgatcgagattacaatttgacatctggagtgacttaaatgctgaagacagaaaaagaaaaaatggcagccggagaattatacaattcggaagatcaacaactagtactagaacgcaagcatgcgagacagctgattagacaatataacgaaacaccggaagatgatatagtgcggacagagcttttgaaggagctgctcggttcggttggggatcaagtcacgattttgccgacattccgctgtgattatggctatcatattcatatcggagatcatacatttgttaattttgactgtgtcattttagatgtgtgtgaggtgcgtatcggccgtcattgtttgattgcgccaggtgtacatatctacacggccggtcatcctcttgatccgatcgaaaggaaatccgggaaggagttcggtaagcctgtgacaattggagatcaagtttggattggaggccgggcggtgattaacccgggagtgacaatcggtgataacgcagtgattgcttctggatctgttgtcactaaggatgtacccgctaatactgttgtaggcggaaaccccgcaaggattttgaagcaattgtaatgagatcagtgcggcagatccgcactgacttttttaaatctgttttgcattcgtattaggaccgaagaagattaacagcaaggagcatgcgagccagcagcccccaataaataagaagacgctgatatagccgagctgaacggcaataaatccgacaagcaatgagccaaaaatgtttgaaaaacggccaagaccataggctaaaccgctgccagacgagcggtattcagtcggataaggttcagatgtataggcgtataagttcgaggtaaagacccgttctgtgatattcacgataaaaccaaatacaatgatcatgatgggaataaaagtcataccatataagagcccggcgatggccgtcagaaacgcactcgcagctaaaatccattttctttgaaatctttcggaaatcatggagccgagcagtgcgccaagcggagcgccgacggaatgcaatacgttataccataatgtattttccatggttacgccattactttttagcaggcttggaacccatgaagcaaatccgtaaaacccaaacgtttcaaaaatccatacagcagataatacgatggtgattttgaggtttctgcctttcaataagcctgcgtaacctgcattctgcttaacagtttcgcttactttaggctgggatgctgccggaagcgggcctttctccttttcaacctgttcttcaattcgggtgaggatcgcatcggctttcgcatattccccgcgattttcgtgccagcgaggtgactcttccagacggcggatgaagaaaaaataaataaggccgacggcaccccatacaaatactagcctccatccccatgaaccaagaggaatgacaaaggcagacacaatgttggtgatcggaaccccaatcaatccaatcatggcacaaaaagaaatatattttccacgtacacttgaagggaaaaattccgccaaatagctattcgtaatgaccatggcggctgcaacgccaaatccggtgaggaaacggaatgtcattaaagatggaatgtcccatgccgcagcattgcatagcgatgcgattgagaaaacaaagacaaatagatttaaggcttttttgcggccgattcgatcggacagccgtccgcccagtgaagcgcctaaaaacatgcctaaaaacgaagcagccgttacgttagcaatagttgaaagcgggatgccccaatgctcgatcagtgccggcgctacattgctgagggtaaataaatctgcgagatcaaagaaataaacaatgccgagagcggttaacacttggaaatgaacgcgtgaaatcggaaggcggtctaaacgattcgctgcgtttgagaaaggatgtgtattcttttgtttgaagatcgtattcataaaaaacccccttttgagtagtaagaaaagactgaaaattcccctcttgggactattataagtatcttggttcattggcaacagagttcaaatcactagatgtaagaactaaattcacactttatattttaattttgcttaaaagatttccaaaacagtagattcatagaccaatttatgcaaatatatagtaatattctcattgaaaggaagagacatagaaggaatgaattcatttatccgtcctatagaaggaaacaatacgttgtggagatattttttcgcttttttggtgatggtagggttatatgtattcgggaatatagcttaccttttcgctatattgttcacggttattgtgaatcccaatatcacgtttgatttggatgaagctgtactgagtgatcctctcgtagatctttatttgtcccatgtgatttatttattcgccattccgggagtatggctggctgtgcgctttattttgaagcggcctttccgaactgtgattacaccaaattcaaagatgaattggcggagaatttcctttggctttattgcttatttcttgctgatgatcgccgtacaattgattgattttgtgattcatcctgatagctattcaatgcaagagtttaatgcctcacgctttatctggctgctagcggctgccctcattttggttccgattcagacatcagctgaggaactgtttttcaggggatttttgcttcaagctttcgggagattgacgaaaaatcctctatttttgacactgattgtcggaggattgtttggcgtattgcattttgcgaatccagaaatgaacaacggtgctgtctgggcaggaattgagtatttaacatttggttttgtgtggacctattacacgattaaaactggaagcatcgaaatatcacttggcgcccatgccgcgaataatatgtttttgtgtatgtttattacagaaaaaaacagtgtgtatggaggaattccttctctctttacggttacgcgggggaacccgatgtgggaggctttctttacgatagcggtcaaccttgtgtttgcagggatcgctttatggtaccataagaaatcaaaaagtaagcagcaagggtcttaatccctgctgcttattaacgtgtggatcgcttcttcaatatttgttgtcggctgctggcaggcgaagttttcacaaatatacacggttgttttgccgtctatgatgcggtagtctgctgcaaatggcgcaatgtctttgcattgatcaggatgctctgctaccagaatggagtcgttaggcttaaaggctttttggagctctgttatgatttgttttctggctggatcgtctgcgttgccaaaaataacgatttctttcttaggcatcagatgtcttaacacactttgcataaagaaagcatggccgctcggatacgcgtcgatgtctggcttgaacacggaaaacattgtttccgctttttcgatcagtgataagtcgcctgtaacttggccgagacgcagcagctgcacggctgccacactgtttcctgaaggcacagcgccgtcgtacacctctttttcccggacgattaaggcttctgcatcgtgtccggtgaagtagaatccgccatgctcctcatcccaaaataagctgatcatatcgtctgtcagtttcttcgctttttgtaaataagaaagatcaaacgaagcttcatagagatccagataagcccataggagaaaagcgtaatcgtcgataaagcctttgtttttcacttcgccatcacgatatcggaccatcacacggccgtcgatgattaatttgttttcaataaatgtgatggcgtctttcgctaggctgagatatttcggctcctggtatacctttgccgctttcgcaagacccgcgatcatcagcgcgttccatgaggtcagcactttatcatcgacatggggataggctctttcctcgcgtgtcttcaagagctgctgtcttgcgtcttcgagtttgaggctgagctctttttcggttaacccggcatcctctttgatttgttctcgctttgtgtgaatgaggttaggtatatttttgccttcaaagtttccttcttcagtgatgtcatacacttggcaatacagcgttccgagatcgtctccgagcgtttttagaatctcttcctttgaccacacgtagtactttccttcttctccttctgtatccgcgtctaaagcagagaaaaagcttccgtcttcatgagtcatttccctctgaatgaacgtaatgatctgctcacaaatctctttatagcggctgttttgcgtgacctgataggcttctgtataagcggtcagcagcagcgcattgtcgtacagcattttttcaaagtggggaacgagccactcgtcatcggtcgaatagcgggcgaacccatagccgatatgatcgtaaatgccgccattcgccatgctgtccagcgttttcgtcacgttgtataaagcgttctcctgccccgtattgtgatgataacgaagcaaatacatcagcatatggggcatcggaaatttcggtgcctgcccgaaaccgccgtagatcgtatcaaacccgctggcaagctgctggaatgtccggtgaatcgctgactcgctaaggccgtcgcctgacttggcggctgttttggtctgcaaatgtttagcggcgttctccgcaatatcctcgacatgctcgcggtcgtttgcaaacgtctcagacagatgctcaagcacatcaacaaaaccgggacgattgaatttgctcgtctttggaaaatatgtacccgcgtaaaacggcttctgatcaggcgtgataaacacattcagcggccagccgccctgcccggtcatcagctggcagattctcatataaacagaatccacatcaggccgctcttcccggtcgactttaatcgccacaaaccgttcattgagaagacgcgcgatttcttcatcttcaaagctttcgtgggccataacgtggcaccaatgacaagtcgaataaccgatgctgaccagaaccggcttgttttcgcgtttcgctttttcaaatgcttcatctccccaagggaaccagtccacagggttgtgggcgtgttggagtaaataaggagacttttcagcgattaatctattgggtttacttttgtttggcatgggatcagctttttcctaagttggttatattcaggttaccacagttatcctaaacaaatacaataactgactgcttatcgataattgtgatgtgaaaatataaactaatgtttcattttgccacttgagataaatgcgaattacgtttttccttgtttcgcaatctggtcaaatttttataaaaaaagtaaaagtttaaaccttagtctatatataataagatcatatcaatcaaatgtagggggagttattatgaagtgcaataaaatgaacagggtacaattaaaagagggaagcgtatcaatgaccctataaactgcgtctgccctcattaatggaggggaaattgtgaatacgtcttattcacagtcaactttacggcacaatcaagttttgatttggctttgtgttctatcatttttcagcgtattaaatgaaatggttctgaacgtctcattacctgatattgccaacgagtttaataaactgccagcaagtgcaaactgggtgaatactgcctttatgttaaccttctccattggaacagctctatatggaaagttatcagaccagatgggcatcaaaaatctgcttctatttgggattatggtaaatggcttagggtcgatcattggatttgttggacactctttcttttctatactcattttagcccggtttattcaagggattggtgcagccgcattcccagctcttgtgatggttgtcgttgcgcgctatattccaaaagagaacagggggaaagcatttggcctgatcgggtccctggtagcaatgggagaaggtgttgggccagctattggcggaatggttgctcattatatccattggtcgtatttgctgcttattccaactgcaacaattatcaccgttccattccttataaaattgttgaaaaaggaagagagaataagaggacacattgatatggcagggattatattgatgtctgcaggtatcttattttttatgctgtttacaacatcttatagattttcttttctgatcatcagtattcttgctttcttcatatttgtaaaacacattaggaaagctcaggacccttttgttgaccctgaattagggaaaaacgtcttttttgtgattggaaccctttacggaggactaatatttggtacagtagcaggatttgtctctatggttccttacatgatgaaagatgttcaccatttaagtactgcagcaattggaagcggcattattttccccggaacaatgagtgtcatcatcttcggttacattgggggattgcttgttgatcggaaaggttccttgtatgtactaactattggaagtgccttgctttcttccggctttttaatcgctgccttttttatagatgcagcaccatggatcatgacaattatagtaatttttgtttttggggggctatctttcacaaaaacagttatatctacagttgtgtctagcagtttgaaagaaaaggaagcgggcgctggaatgagtttgcttaatttcacgagctttttatcagagggaacgggtattgcgattgtaggcggtttattatctatcggcttcttagaccataggctgctgcctattgacgttgatcactctacctatttgtatagcaatatgctcatactttttgcagggaccattgttatttgttggctagtaatcttgaatgtatataaacgttcgcggaggcatcgctaaatgagtgaaaggatcaatcttgtgaaagtaatccaaggttgatccttttttgtaaaatgaataaacatggcatcaatagcatgttctttagattagccatcgttagctataccccatagatacgagaacaggcttgttttcgcgtttcactttttcatatgcttcttctccccaagggaaccagtcaacaggattgtggcatgttgaagtaaaataagtagacttctcagcgattaatctattgggtttattgttagtaggcattggatcaccttctttcgtttttttataaatacaaaacttagccgattacttaaaagagggagaagaaaatatactataatgcttaatgatgttaatggaggagacatcgtccttttcaatcctcttttattacagaaaatttgatattgataattccatagtatattaaggggaacccattatttatggattcccctttagttcaataagaaggattactgtcgagtgttactttacaatgttagccattccaatgataaacgatttgcacaacgccagaggaaaatgttcttgtattcaccatttttaaatttatcctctgttttacatcaataaacaacggttttccttctcccaaaacaacagggtgaatagataatctaaattcatcaacaagccccaaatttataaaagttgtaatgagactcgctccaccatatagccagatgtctttaccaggatttttcttcaatttatttacttcttcaagaatattatcatttataaatatggcttgattatcaatctcattttgtgttctggaaaaaacatatttctttttactatgaaccaatttccaaagttccttttctgtatcagggtcttcattttttggaatgtattgtccccataaatcgtagctttttctaccatataaaatagtatcaatttgatttaaaaaatcagtaaaccccatatcagggtccataatacaccaatcaacttctccatttttcccttcaatataaccatctaaagtaactgctaaatctaaaatgattcttctctgttttaagttatttgtcataactattcatccttttccataagaagttggtagaaattcttctcccactctcgcaccagatagactaagttgcgtttatggactgagtgaagaacagtatcctaaaatgaaagtgcccactacttttcgcagcttgattagccggaacactctttatcttcacttggttaaatgaaagctctgctcgattaagttatagatttcgccttctggatctgtccgttctaaaacaattgaaatccaatgttccttatccatatgatatccgggtaagatattttccccgtttcttaagctatcacttatttcagggggacattttagatttagaatatctatttcgccatgaccatccaagcctaatttttctgggagaatattcatgataagaccgtaccattttttgtttgatgtatgtctcaaagaagcatagtttgggtatttctcccacgggtaatcaggcgatgtaccgtatttttctttgacgtgtttaaagatatcttctcttgttaacatactcaatcactcctttattcgctctactttcttcttgaaaaagtcaaagagcgatccttggttgtcctttggatacttcaatagagatgtcaccaatggcagaagctgtgtcaaagcttcctctctccacggatactagtcaacagggttgtgggcgagttgaaggaagtatgatatttctcattgagtttattgttagtgggcataggttcatcttcttttctcttgtttctattcctttttactgtaccacaagcctctgttgaaataccccattaagacagtgaaatagaaaaatcgctatatataaaaggtgatggatgctgttcttttaaagagtgcccttttggaagctgttattgatcgaaacgagtatgctaatataatctcgtctaggaggggattgatatgatcaagaaaatggctcaaatgaatttgaaagatttcaataaaccaaatgaacctttcgttgtttttgggagaatgatacctgcttttgaaaacggtgtttggacatatactgaggaacgattttctgaaccttattttaaacaatatgaagatgatgaaatggatgttagttatattgaagatgaagggaaggttgtctttttatattatgttgaaaacaactgcatcggccggattaagattcgttctaactggaatgggtatgcactaatagaggacattgccgttgcaaaagactatagacaaaaaggcgttggaacagcattattacataaagcgattgagtgggcaaaggagaatcgcttttgtggtcttatgcttgaaacacaagatattaatgtttcagcttgtcgtttttatgccaaacatcactttataataggtgcagttgatacgatgctttattccaaccttccaacagcaaatgaaattgcgattttttggtactataaattttaatttatcataaaattattgaacgaaacgtagcttgttttgcgtttcgttttttcaaagaagaggttttttaaccccttcttttttttgataagaattgtttttccacaataggcataaaaacgtgaaggatcattcctcccaaacagacggttaatagggttccgatgccgatagggcctttaaagatgatggctaatactaagaaaagagcgtataccaatgttcttgaaaacaagattgttcttttggagagatctcggataataagtgttaaatgatcgatgggtgttgatgcgaatttcgtctgaagatagatggctgttccaagaccgatgagcatcaaaccaattccgaaacaaatcagtttgcttaacaacgcatttagatagatggtgttttttacaacaaacaaccataggtcaatgcctattccagtaatgaatgctgtaattaagcctagcaaaataggtttttttctcgttaatatagcgttgcagattaagaggatcacagaaataaggacctcccagctccctacggtaagaccgatttcttttgacagaccaaccaaaagggcatcgaagggtgatgtgcccagtcctgattgtatggttaaggaaatgcccaaacttaatatgagtatgcctaatccgtaaaaaatatatttcatgttatattccgcgatatgtcttttgtcatcaagacatgagggatgccgtcttccataaattcctgtgaagaaatctggtagcccagtttttgataaaagcctgctgcttgtgtttgaccatgcagcttacatgcagtcagtcctttttcttttatgatttcttctaaccagcttacgatgactttccccaatccatacttacggtaaggttttaggatgcagattctttccagctttgctgtatggtcaacgatgcgcacacggcccgtgccgacaggctgattctcatgatataccaagacatgctggcattgttcctggagcgtatcaaattcatcgaactcttcggattccgatacatgttgctcctcaatgaaaaccgtctttctaatattcaaagcttcatgtaaatcagcttcagttgttattctttttatattcattatgaatcaatccttttctgatattagtctggactgtacagcatgcatgtggtcttataatagtaaggttaaaacatttttgttgtaattgcaacaaaaatacgtgaggggttttaggaatgaatgatattttgcgtgagatcggcatgatagcaagagcgttggattccataagcaacatcgaatttaaagatttggacttaacaagagggcagtatctctatctcgtacgtatatacgaaaatccgggaattattcaagaaaaattggcggaaatgataaaggtggaccggacaacggccgcgcgggccattaagaagctggaaatgcagggatttattcaaaaactgccagatgagcaaaataaaaaaataaaaaaactgttcccgactgagaaagggaaaaaggtatatccattgttaagaagagaaggagaacattccacggaagtggccttgtccggttttacttcagaggaaaaggaaaccatttctgcactccttcatagagtgaggaagaatatagaacgtgattgggaatatgtgaagaaggggaacaaaagggattattaatggacaacgttaacaagttgagctgatgctggcgaaaatcggcgtttcctctcaagaatccagtcagctcgagcgtgggtgaaaatagtccgttcacttctgttttctttaaaactatcaaaaaatttccacaggagatggtttgcgtgaacttgagacaactatcagaacatgtctatcaatgtgaatttgagcttgatgtgcctcttcgtattccggttcatacttggtttatcaaagatggtgatgatgtttatattgttgatacgggaatagaacgttttgctgatgctcaaattagggcagcgttagcgatcggcaatccaaaagccattttgcttacccatggccacagtgatcatatcgggggtgcatcaaaatggttagagagatttgatattccgatttttgcgcaccagaaagaactaaagtacatcaatggggaagagccatatccgaacaaaaatgaagtggagaacacaggggtagcccatattgtccagccgctgacggagcaaacgcttgctcacctgcctctgaaatactatttaacacctggccattctcctgggcatgtcgtgtattatcataaaatcgatcgtacgttattaacgggcgacctttttatcacaagtaagggggatttacacccacctataagaagattcagtgttgatataaatgagaacatcgatagcggctcaatcatagatcaaatcaaaccaacgctcatttgctcttcacatggcgaagaaatcctttataacgaagaattgtataaaaactatgtggtaaggtatagggattaatggaagtgaaaaacataagctgaaaattcttcagcatggtgcagctctcgatccgatttactcacacccaaaaagaaaaaatggcagctgcctgccgcagaggcttttggagcttgttttacattcgattcatgagcaaaaggagtgagtgtcaggctcactccttttctatttaaattgcggctgtgagctttggttttacaaatttcatgaaaactcctctgactaatgggcccataatcagtaattgcaacggataggccaggatgaagtttttcaacacaatcataagataagcactgaagaggctgtccccgttcagcccatttgctagaaccgctgtcactaaaccgaacacagacatacaaagtaccatgccaatcaccatacaagttgacatggcaaggatgacataaatttttttagtcttgtcgaacggcatgcggaatgcaatcttcttggcgagggggcccactaacagtaaatctaacaggagggcgaccataaaaccgatgaccatttcaaaaacggtcatcagtgaaaaatcgtagatggctccgttgatgatggcattgtaaatcgacatgacgcaaaccattccaaagcacatcatcacgccaaatataaggccttcttttttatttgctggcatacaatcattccttctctccataatcggtgattagtataccaatgaaccgttcatgctcataagtgacaaatttgtgaacaatctatagcgcagaatcgtcttgttttgtcatcagcacatgcggaatgccgtccagcataaattcttctgatgcagtccgatagccgagcttttcataaaagcctgccgcctgtgtctggccgtgcagtttgaaggcagaaatgccttgttcttttacaatacgttctaatgcatcgacgatcacttttcccaaaccgaatttgcggtaagacttcagaatgcagattcgttccagtttccccgtgtggccaacgatacggacacgtgcagtgccaacaggtacattctgatgataagccagaatgtgctggcaatcaccgtggagtgtatcgaactcatcgaattcatccgaaatgggacagccttgttcctctacaaatactgcctttctgatttcaaaagctgtatgtaaatcctgttctgacgtgatttttttgacattcatgtttgaatcctccctactcagaaaaatggctgatcacatattgtttaaaggtctcagcaaccggtgataaaaacctgccttttatccaggcaattcctatgacacgctgacattccggccagctgacgcggattttggtgattttgctttggtctaagcctttcaggtctgggagaatagatatgcccagtccggctgccacaaaacctgcggcagtagctgcttcttctccttcaaacataatgttcggctgtatatcggccttctcaaacagctcatcgaccgtcatccgaagcgcatagccctttttcaataaaataaaacgctccccggcaatctcattcagggtaatgctttcgcgactggctaatggatgatcatttggcacaaatacaaagagttcttcactccacagcttgatccattggatcggattttcaggcttaatcgaagcgaggagacagaggtccagatctccggattttaatcgttcaagcagccaataagagtggttttgcttcagctggaaggaaatgttggggtattcctgctgaaaggagccgatgagatcgggcacgagcgtggtgcctaatgtatgtaaaaaaccgagagagactacgccttggtctggctttaataaggcttggatttcttcttttccttcggtatactccttcatcatcgcctgaacccgtcgtaaaaaaatgtgtccgtattgatttaagctgatggatcgtccttgcctgtcaaatagcgggacgcccaaatgattttccagcctggcgatagagcgtgaaagtgcaggctgtgtgatggagaggctttttgcggctttcgtgacgtgctgcatccgggccagtgtttgaaaatattcaagttgttcccattccaattatcatctctccttattacatataagcatgaaaacgatattttatatgcattatacaacatatatcaacggtgctaagataataatataaacagactcaaggatgtttgaattcggaagaaataaaggatgattgtttatgaatggcagtgctccacaacatgatgagggaccgataaagtcccgatgacatacattcgaaaaggcacaccggtttttcgaaaaattacgtttgctttcttcgctgcgggtttcaatacatttgcgattctatattgcgtacagccgctcatggaggaattcacgcgggaatttcatgtgacgcctactgcggcgagtctttctttatctgttaccacaatgctgttagctgtgagcatgcttgtctttggttcattatccgaggtgtggggacgcaagcctattatgggtatttccatgctggccgcatcggttctctgtctggcatcggcctttagtccgagctttcatacactgctcgtattgagaaccattcaaggcgttgcgctcgcaggccttccgtcgattgcgatggcttatcttggggaagaaattgaacccggaagtcttggatcagcgatggggctatatatcagcggaaatgcaatcggcgccgttttcggaaggatcgtttccgggctcctgagcgagtacttgaattggcatatggcgatggggacaattggtgtcattagtttgattgctagtgttatattttttataaatttgccgccatccaggcattttacgccaagaaaattgaagctcgggaaattgggaatgtctctgatcgaccacttgaaggaccgaaaactattcagcttgtttctcattggttttttgctgctcggaagcaatgttgccttgtttaattacattgtgtatgtgctgttgggcccgccgtattcgcttaataaagcattttccagctggatctttattgtgatgattgtaggcattttcagctcgtctttcattggaagaatggttgatcggtatggctatccgaaaatattggtgatgaatattttcatcgtcattgcaggtgctttattcacgataaacagtatgctggcagtgaaaattctggggattgccctctttacattcggttttttcggcggacattcagttgccagcagctgggtgggacggagagctcttcacaacaaagcacaggcttcatcgctgtatttgttcttttattatgccggttcaagtgttttcggaacaatcggagggctattctggtctggttttcattggctgggcgttgtcggtatgatcaccttcatgctgctgattgcgttatggctgtcgggatacttggcaagaagtgcgaaagtgccggataaaagcaacgaaaaaggattcaattgatgacagcaaaaaaggaccataagcgggtccttttttatttccaatgggcagggattcgtaaagacggcggcagctttgtgttcgaatcgccgttggcggcgttcacctgtgcctgtgtcaaaaagatgctcccggtcaggtcggcgccgctgagatcagcgtctctcatatctgcaccgataaagtctgtcattctcaaatcggcatttctcagatcggcggctatgagcagcgcccctcttagatttgctcctcgcagatcaagccctttcagtttcgcgccgatcaggacacttccccggctgacctttttcgggagttttggatggcgggcttgggcacgcaccagctcacttgtttttaacagccattcattgacctcagctcgatgctcgtccacctgcagtgtcagcaggcgttctttgctgagtctggtgagcttttctattttttcgaaactggttctcagttcgggatgaatcggcttggctatatctatagaaagagcttcatgtaaataccagagcatttcgtgcagctgctgcatgataggaaaaacgtcaaacatctggttggccgtttcggggctgcttcgccaatcctttccctcataagtgatttgggatactttttggccggcgccaaagcattcatatgcagagcagccttgaaatcctttttctctgagatctttatgtatagaacattgatagtttgattgtaagttgcggcaaggcgtgcccccgtctttatcaaaagcaaaatctgccgacttcacataaggcaaggcgacacagcacaggccaaaacagtgctggcaatccgcacttaaatcatgatgtctattgtcatgtaacgttacttccgcagacaataatgttcaccccttcacttgggtactttgttaaatatatctatttgattatataggaaaaaaggatacttttcattttgttttcaaggtttcagtggtctagcgatgtataatatatccaatcatgatgattgggggaattcatttggaacagcaattgaaagacatcatctctgcgtgtgatttggcaatccaaaatgaagattttgatacactgatgaattattattcggaagatgccattttagttgtgaagccgggcatgatcgcgcgaggcaaagaagaaatcaaaaaagcgtttatcacgattgcgaactatttcaatcatcatattgtcccgaaacaaggggaaatgatcctgttggaagcaggtgacacggtactcgtcctttctcagacactgcttgattcggataaaaaggactccgagtatgcgatggaaagaagggcgacctatgtatttaagaagaatgcgcaaggcgagtggctttgtgtaatcgataactcatatggtacggatttaattggtgtgtaagatatgtctttgatgtgccatacctgcatataatgattcattcagctgattagggaaggtgacacaattgaatgtgtatgacatcagaatggctccttattggttttatgaaagcagaggacttgttcaacatccatacgtatttcggcagcctgtctcctcacgtgcaatcattgcatctactcgcggcgatgtaacgggagacggcgttattgacgaggtctttctaactggaaatcaaatgcccggcagcccgttatggagaaatatcacattggtgatccgtgatggcagaacccatcaggagcagcagattcagcttcaaaacaatatgggatacaatccgtcactttttctgggggatatgacaggcgacaagattgaggatgtggcagtggtaatggacacagggggaagcggcggtgctatttatgcatacgtgtttgcctatctaaacaggcagttccggcgaattttcaattcagatgtattgaatgatgaaataaagtacagtgtgaggtatcaaaatcaatataaagcgagcgtcatcagtcatcagcaaaacgaaacgtatatcctcgaccttacttacaaaggcagggaatatttgaatgagatttataacagccaaggtgtgttaaaaatgccgatagaaggatgggtgaatcctttatcgggcttgtatccggttgattttgacagagacggcgtatacgaattattggcgtaccagcggatagcgggaaggtataacgccgactcattgggatatgttcaaaccgtattaaaatggaacggacggcgttttgccgttgaccggcagaatgtttcgattgttggcggggctgtctcgtaatcctgatggctgtcaccctataaagggtgacaaaacactacaggtgttctgcaacgacaaccaaataataagataaaccggcttgctgctcttctaacattcctctatggaaatcatcttgcataaaaaaacgtgtttgttttacgtagtcttctttacttgtcggatgcccgttctgatttaggaacttaagatgattcatgacatgctcttgcacggaagggtcatgatacgttacaccgtttcttaaaaaatcagccatcctatcaagaaaatgtttagcctctattgccattttgttcatttcatcgacattgattgtatgtgtatccaattcaaaatcgtaacgctcttttaaatacccattttgttctgctaaagattgtttccattcttcagcgctttcaaatcctttaaacattaccttatgatccatgttttcgccttttctcgtgtattctaaagatgtgttgactgtttgaatgagacgctgatacttttcaattttcttttcaaacagctttttttgtttttctaatgtacttgttctttcagcatcctcatttaataatcttttgatttctgacaaaggaatatctaattctttgtaaaaaaggatttcctgcagtctttttagttcgtcagcaccatagtaccgatatccggcttcgcttatttcctttggggccagcaagccgattttgtggtaatgataaagcgttttgattgtgacattcgcaatattggatagttcttttactgttaatttcaccatccgactcctcctttcttctttcactatgaggccttacctttggttggagtcaaggataaaatggtggtgttttcgtccgaagacagcctagtgaatgtgggagaaagaaaataacacctggcggattcaaagaaaagagtgcttttcagcaagcactctttattccagtttaattcgttttacatctcctaatacaaacacataaaaaaccaatcccagcaacagcacaaaaccagctaccagaaagctgagggtaaaggagcctgtcacatcaaacaaataccctgtcagtgacgcagcaataatgcctccgaacaggttatttgcgagattcaccatggagctcagcatggatacggaaccgatcggcgcgagttctgcggagatggaccagccgaccggagcggttgctgaaattccggcgagtccgatggaaatgcaaataatagctacggtaatattgttcgtcagaatggagcctaaaaagaaaaagccaaagctcattccgactatgattacggttcggtacaccttggtgttaggatagcctttcttaataaaataatcgacgagccagccgccgacggcaattccggaaatggttgagatcagccacggcactgccgtaaataaaccggacgacatgagatccataccgtatgtatgtttaaagaaagtcggaagccaggtgagcagcaggttgaatgtatacccgtaccctgtaaatccgatcattaagccccatactttccgattgttgaaaagcttttttaaaagcgggcccgttttgtaagggatttgctctgttgtaatggcattgtgtttttgaatatagtttagttcacttttagaaatacgtttgtgccgttcaggctgttcataatactgccagaaaaagatcgtaaacagcacattgatgcatccaatcgtcaaaaaagcgacacgccagtcaaatgttgtgacaagaaaggcgaccaatggcgcgccgattacatttgaaaacttggcggccgaatcgaacagtgagtttgccaatccccgctcacttggaggaaaccagagagcggttgctttagaggcagcagggaacgcagaggcgctcgtcagcccaatgagaaaccggaacagatacaacagcaattttccttgcaaaaaagcaagaaggatcgttaaaaagctccatattgtcattccaaccctcgtgacccatgcgaccccaaaacggtccagcaaacttccgacaggcagctgcatcagtgtataggaataggtgtaaatggaaaacacgatgccgagttcagttgcagtaaggtgaaacgaatcttgtatcgcaggggccgctaccgagatggccactcggtcaaaataattaagaataataatgccgctaagtaacgaagatatgtaccatctggtatgcccaggccgtttcacgcgctcttgactcatgatgaaaacctcctctgtcatagcatgatctcctgatggaaaaaccattcaaattttaaataccacagcgctcttttatataaacggcaggaatttgactggaacagatcggtgctttagaatgaaagtaataaaaatgaacactccaaaggggagtagctttcacagtaaagtcgtcattacgggacaagttgtcctcggctttgctggcaatctcatttgttagcgagacctttgccaaatctgatttggtgaaggtctttttgtttcaggaacttcaccaaattggtggagttttttcatttttaccaaaaagggagaggagcatcagaatgtctaagctgaaaaagtggctgaagcgtgaattggtgaggaaagggctgccattagcgaaagagaaattgattccgatcttaaaagaaaaaatgaaaaagaaacgatgagggggctgaagatgaagatcattttgacaatacttgccggagtgggacttttgagtgcaggcggatgcggcatgcttgatcaggtgaacgacggattgaactatacgagtgaagcagcggggtatgtggagaaggtgaagacatttgcagaggaagcgcctgaattggctgagaaagctgtaaatgacaccgaggcgaaagaaaaacttgaagcgcagcttgagtcgattcagaaggatgccgctgattttaatgaattaacgccgcctgatgccgcagcggagattcatcaaaccattcaggagcataacgaaaccttgcagaaaagcgctgaagaggtgttgaaacaagccgaggaaggcaaggtatcgcttaaagaattggagcagtcagacctggtccaaaacgcaaagcaaattactgatgtgatgggacaaattgagaagctgggtgaataagaaaaagcatcccgacgcgggatgctttttgcttattcagccattgcgtctgttaagacaggaacgacttgttttttacgggaaacaacgccttttaagagggctgtgttgttttctaatgtaacgttgaacgctttttccactttcgctgcttcgttaccgattgcaagagcaagtgaatcattttctaagatatcagtgataacgagaaggaacagatcaagattcttctcagccacaacttttgagatcatggcttctaattcagcttggcgttttttcacatcttcaatgtccactgtgtttacttgtgcgatttcgactttcttgctgccgagtgtaaattctttcgcatcaagagaaatgagctcttccactgtttttttgcttagatcagcgcctgctttcagcatgttcaaaccgtattcttcagcatctacgccagcgatctccgcaagctcttttgctgccgctacgtcttggtctgtgcaagttggagatttaaataacagggaatcagaaatgatcgcagacagcataaggccggcaatttctttctcgattttcacgttattctctttgtacattttgtttaagatggtagccgtacagcctacaggctcagcacgatagtaaagcggctcagctgtttcaaagttagcgatgcggtgatggtcgataacctctaaaacctgaacctcttcaatgtctttgatgctttgctggcgttcgttatggtcaaccaggataacgccgtttacttcgtttgcagctgtttcaacaagacgcgggctttcttgtttgaaatagtcaagcgcgtattgtgtttcgccgttgacttgtccgagacggacaggctcagcattgaagccgagtttgtttttcaaatcagcataagcaatcgcagaacaaatcgtatctgtgtctgggttttggtgtccgaaaataagtatcttttccatgatagctcctatcctttttttaagtagtgtaatctttatatagtttaacacgtcttgctgcaggtgtaatcatgcaaacccttaaaaattgatgtgaataagaagcattttctttgagctaaggagaaaaggtgtgtaaaatactgggtagcttagttgcaaaatgtaatgtagtatcaaaaaaggtactattggagggtcaagaatgagtggaaaaaagaatatatacccgaacaaagaaggctgtccagttgaatttactctagatgtcattggcggaaagtggaaaggaattcttttttatcacatgatagatggcaagaaacgatttaatgagtttcggcgaatctgcccgagtattactcaaagaatgcttactcttcagctgagggagctggaagcggacggcatcgtgcatcgtgaggtttatcaacaggtgccgcccaaggttgagtactctctgacggaattcgggcgaacgcttgaaccgattgttttgcaaatgaaagaatggggagaatccaacagagacgtgctggaatcttatcgttcgaacggcttactgaaggatcagcagaaatagcagcaaagggaaaactcctttgctgcttgttttatttcattgaaatggctctgttggcgtttctgacatcgtttttcaacagttcagaaaggttgtaagacggataatatccatgctgatacatgtatcgataaacttgggcgtgcagctggatggcagcattcagctgtttgaccagtacgtttcttaattgaggtgttgctgtttctgtaattgcgatggcatagctgcggacagatgttttggcaaaaccgagcaggtcaccgctgtaaaatgggttatctgcgcgttcttcttcctcatcctctctgtgcggagcctgtggaaagaacggaagaagctctcttaaattttgctcaacgccctgaatagacacgttataaagctgtctgagctgagggtcttttacttctcttatcattttcttcagtttaatgagtccgtttgattgaaaagcaaccagctcgtgcatttctaatgtttcatgccaagccaatgttctgcgttcatccatgtgaaaattctcctttatcgatcagattccatatcagcatatgcccaacgctcaatgttgttcatgatgttttgaagtttttaaaaagggaaattcaccttatataggaaacgggttgagaacatgcacaaagaggtgaaacacaatgtgggacatgataaagaactttttcttgtttagcagcggcgttctgcaagcaacaacccttttactggtgatcttaatttttatgtatgtcagaaaaacgaaaaagaaaaacaaggaatcttctggctttatggatgataaacattaattgtgatgggcattcttttcaaagaatgtcttttcatttttcatgtttcacatgaaacattagcgtcattttacttgcgatttggacttatgttaaaatataaaagtaaaatttagagatgatataaaaacattcggtgcaaagtatgttgcagcgatgaaaaagagcagtcgtttatgctgctcttttctattcgtatgttcaggatgatacgaggtgactaagtgaaacaaacgagagctttaatggaaggtgctattttaatcagtctgtttgcgatcatcacgcttctggtcgtttatgttcctgtgattggaacaattctgttatttgcactgccgctgccaatgatcttgtatacgatcagacatggattgaagctagggatatggatgggcgctgtcagtcttccggttgtttttattgtcgggtcctttaacgggcttattgtagcttttatgtcagcttgcgccggcattgccatgggacattttttcaaaaggaaagagcccgggcacgccattatttcgggcgctcttatttatatgcttagtattgtcttctattttgtgataagcattcagtttttgggtatcaatatcattgatgaggcgatgacacaataccggcaatctcttgatatggtagaaactgtagcgaagcagtcgggcaatgctggacagtttgagaagcaattaaaactgatggaagaacaattgggtatcgttcaatatctttttccaacagctattgtgatggtaggagttattttttctttcctcagttaccttatcgctaagccgctcttaaggcgattctcccccgatattcctaatctaaagccttttagagagttgaagtttccgcaaagtgttgtagtactgtatttgattattgtcatgctttcatttttgcctttagaaaaaggccaaatgctgtactctatcgctttaaatggggagtttatactcgggtttctgattttcatccaaggtttatcatttatctttttctattgccataagaaacaatatccaaaggctgcggctgtgattgctgtcatacttgggtttgtgcatccggtcttcatggcagccattcgcattttaggcgttttagatatgggctttcatataaggaataaggtgaagtgaacatgagttttactcacatggtggggagtgatagaaatgccaagcttttatgaaaaaccgctgtttcggtatcccatctatgcattgattgctctgtcaattattacaatcctcatcagcttttattttaactggatattaggaaccgtcgaagtgctgctgctggcagttattttgttttttattaagcgtgctgattctcttattcgacaagagattgatgcttatatttctacgttgtcctacaggttgaaaaaagtcggtgaagaggcattgatggaaatgccgattggaatcatgctttttaatgaccaatattatatagaatgggcaaatccgtttctttcctcttgctttaatgaaagcactttagtggggagatcactttacgatacttgtgaatcggtagtgccgcttatcaaacaagaggtggaatcggaaacggttacattgaatgaccgcaagtttagggttgtcatcaaacgggatgagcgtctcttatatttctttgatgtaacagaacaaatccagattgaaaagctatatgaaaacgaaagaaccgtcctggcatatattttccttgataactatgatgatgtgacacaaggattggatgaccagacgagaagcacgatgaacagccaggtgacatctttgctgaacgcttgggcgcaggagtacgggatcttcttgaaaaggacgtcttcagaacgctttattgctgtacttaatgaacatatcttaactgaactcgaaaattcgaagttttcgattcttgatgaagtgcgggaaaaaacctcgtttgacggtgtagcgctgacgttaagcgtcggtgtcggggcttcagtctcttccctgaaagaacttggcgatttggcgcaatccagcttggacttagcactgggacgcggcggagaccaggtagccattaagctgccaaacggcaaggtgaagttttacggcggtaaaacaaacccaatggagaaacgaacaagggtgcgggcccgcgtgatttctcacgccttaaaggaaatcgtcaccgaaagcagcaatgtgattatcatggggcataaattccccgacatggattctatcggcgcagcgatcgggattttaaaggtggctcaggcaaataacaaagatggttttatcgtgattgacccaaaccaaatcggatcaagtgtgcagcgtttgattggggaaatcaaaaaatatgaagaactgtggtcaagatttattacgcctgaagaagcaatggagatttccaatgatgacacactgcttgtgatcgttgatacacataagccgtcactcgtcatggaggaacggctggtcaataaaattgaacatatcgtggtcatcgaccatcaccgaagaggtgaggagtttatcagagatccgctgcttgtttatatggaaccatacgcttcttccacagcggaattggtgacagagctgcttgaatatcagccgaagcgcttaaaaatcaatatgattgaagcaacagccctattagctggtataatagtggatacaaagagcttttctctccgcacgggctcgcggacttttgatgcggcttcttatttaagggcaaaaggcgccgacacggtgctggtgcagaagttcctgaaagaaaccgttgattcctatattcaacgggcgaagctgatccagcatacggtcctctataaagataacattgcaattgcttctcttcctgaaaatgaagaggaatatttcgatcaagtgctgattgcgcaggctgccgattcgctgctgtcgatgagtgaggttgaggcttcgtttgcggtggcgagacgggatgaacaaacggtttgtatcagtgcgcggtcgcttggcgaggtaaatgttcagatcatcatggaggccctggaaggcggagggcatttaacaaatgcggcgactcagttgtccggcatttcagtttctgaagcgctggaacggctgaagcacgccatagatgagtattttgagggaggcgtacagagatgaaggttattttcttacaagatgtaaaaggaaaaggaaaaaaaggcgaagtcaaaaacgtagcagacggttatgcgcataactttctcattaaaaaaggcctcgcggttgaagcgaacgcttcaaacatcagcgcgctaaacggacaaaagcagaaagagaaaaaagaagccattgctgagcttgagcaggctaagagcttgaaagagacattagaaaaactgactgttgagcttagcgcaaaatcaggtgaaggcggccgtttatttggttcagtgacaagcaagcaaattactgaacagctccaaaaagaccataacattaaagtagataagcggaagcttgaactgccggacggcattcgtgcattaggatatacaaacgtgcctgtgaagctgcatcctgaagtgcaggctgtgttaaaggtacatgtaaaagaagaagcttaatagaaaagaggcttggatgaatccaagcctctttttttattccacgagataaagagtttgctggctttctccgccaggtcctcttcgcattccctgcacgctgtttgtgctgctggaggaaccgctgtactcgtcagatgttatttcttttccgtttttcttaatccaggaaacaagttcgctgttgcctgagttgttttctgacagaaggaagtatttcactttgccttctttgatcagttttttcagttccgacacagtcagaatgggatccgtgccgttaaatccgcccattgccataacagattcattttcgtaaatgatgtatggcgcagctgttacggttgtcaaagtagcaaataaatattcttcgccggtattgtgttttctcagataggacaggagcccgctgtcgacctctgaagagaacatgttcccgccgtttgctgagcctttgagctgcgggccggattcaggaaggacgctgttgccaccgtatagaagcggcgttgctgaccagtaaacaggtgtgagaagcagaacgcacaagctgatgatggtcagctgcttactgaacggatggctgcgtttaagcatcagaagtgcaagggtgataccgagtcctacgagtcccaggacatacatccacacactgccgatttgacttgtataagcactcagaatatacacctggaacgcggctgtgatcagaacggctgccggcagaagataactggaccagtctttattatttttgtataagcggtgcatcgtataccatccgataccagaaagggcggcaatcggcggtgccagcataatcaaataatactggtggaagaatcctgcgatgctgaagaaaccagccacgggaacaagccaagccgcccagaatagcgtttcttttttttcagcagcatgtccgcggcgatcacggtaccagctgacgagtgagcccagtaatccgatcaatgagaatgggagcatccagctgatttggccggaaagtgctgattggaaaagacgaagcggtccaggatcaccggtgccgaacatattcacgctttttccgcctccgccgctaggccctccatttccaggcccgttgccacctgtaggaggtgtgcctccgcctccattgagagcgccggtttgtccgttaggcggctgaggcgcctgtgaatggtttccgaatgattgatttccgttctgagaaaaagatgaaccgttgccatttggcgcttgcatgttgtcttgattctgcatgttccctccgccagcagcattcatatcaccctttgcaaggcccgtagtttgcccaagcagacgctctgtgccgttgtagccaaaggccagttctagcactgagttggtctggctgcttcctacataaggccggcttgaggaagaggctgaatccactgcaatcgcccatgagagtgaaaggcctgtcagaaggacaagagacagaagcagggacccgatttttttcttcagagaaacccgagatgcaaccatgtagaataacacaaatgcaggcaataccataaacgcttgcatcatcttcatattaaaggcgagcccaatcagggcaaatgccgtcagcagccaaaccagcttgccttgttttactgcccgaaacaggcaagctgaaccgagcaatatggtaaaaacgagcatgctgtcgatattgtttgtccggctgacagctactgcgataggggtcagtgccataacaagtgcggaaatgcgggccgctccaattccaaaagtcggcttgatcattctgtagagaaggaagacagatccaactccggcaagagcctggggaatgatgacactccacgtgtgaacaccgaaaatcagtgcgaaaatcgtttgaatccataacacgacaggaggcttatctactgtcacaaatccagaagggtcaaatgacgcataaaagaagttatggaagctttgcgtcatgctttttacagccgccaaatagtactggttcgctgtatcatcctgccaaatgtgatacgtattcaaaaaagctgctgccagcaaaataagaataagggctgcgtcgaatcgtttggttttcatcgtttttcacctctttatggtgtctcattgtaaaaaacaaatatgaaaaacttatgaataaaccataaatattcaaagaaaaaagcggagatatcttccccgctttatgctgaatttctttgtttttctgactggaaaatgtatcgatctcgtccggctccctgtccggctgctcccattacgatcagggcagcaatgagaagcacaataggcatcgtccaagaatgcgtctggtcaaagagatagccgacaaagattggcccgactgctgccagcaggtagccgaatgactgagacatgcctgacagcgcagcggcctgttgggcattttcactgcggagaccaatcaaagtgagcgccagactaatgctggagccttgtccgataccgataatgatcatccagatggcaagcaatgtatggcttccgcccgctaataatccgcaaaggccgatcagataaactgaggccagcgccgcaacgataccgcgctgctgtttcacacggtcagctaaaactggtgtcagaaaagtggaaggcagactcgcaaattgcatgagtgataccatccatccggctgttgccgtatcaattccgtgtgaacggagaatttcaggaaaccaagcgatgctgctgtaaaataaaaacgattgcaggcccataaagatggtgacataccatgccattttggaagcccaaatggaactggattgcagcttcattgtctggtttgccgtatctcgatggcgcagctgaggtatccagattagcaatgcaagtaaagccagcccgccccataagagaaaagcctgtttccatccgccattcatctgggtcgctaaaggaacgctgacacctgatgctaaagctgcgaatatattcattgatgtcgtatacaggctgatcatgatccctggcttttcagggtatttatgtttgattaagcttggcaaaagtacgttaccaatcgcaatcccgacgccgataagtgccgttccgaaaaacaaagctgcagtatagccggtagaacgagtcaaaacgccgataagcagtatcacgagacctagccataaagttcgctcatttccgaggcgctgtccaagcttaggtgcaagtggagaaagaactgcaaacgaaagcagcggcagtgcggtcaaaaaaccggctgccccattggacatgtgcagctctgcccggatagagctgatgaccggacccactgaagtgatcgcgggccgtaagttaaaggcgataaagataatgccggtgatcagccaaaatgattggatttttttattatgtggatgtggcaaagcagttactcctcttttctaacatatacatgatattatcccgaaacaggtaagcaagtatgtgaatgaaggctatgatttgtcctctttttgcagttcagccattttggcaagcagaatatgctgaggcatatgcatgatctgttcaagcggcagattcaaggactctgcaagcttttgtgcagtttcagcagaaatttgcaaaggtctcacaaaagatccctcctctcttctgtccattgtacaagaatcagctgtgaaatgtaagaagatgtcacaaaggaatagagcaatcggaaaatgaccgttataaaagaggtaaggagggttcttatgcacgcaccgttatccttataaaacaaatgctgaaggaacaccaaatagacactgaaaaagctgtcactttcgaagaatatatagcagtgaggctaaagcttcaggagctgatggggaaatttgcttcgatcggggagtgggatctgtatcaaaaagcggcagatttgatgatgcacataggcatccaatggatgaaataaaccgataaccgctaaaaaaccctcgctgcagcgaaggctttcattcattaaaatgagtgttcttcttccacatttttaaactggtcataaattacaagcttagacggactgttttccttagccacctgtttggccttttcaatagcggcgtctttagacgtatacaaagctgtcggcgctacattctccacctcaataaaccagccgtccgcatcaacattaggcgtaatcgcatatttctttatcatctttcattcctccctcatgttttattgcatttttcccgccttgttactgtccgaaacgatccaatctgctaactgaaaaaaacaggaaacagacaatttttctattttttttctgtagaaatggtagaatggaggttggagattttttaatgagaggacggtgcttagcatgacagaccttctgaatgaccggcttcctccgcaaaatatagaagccgaacaagccgtgttaggcgctatttttttacagccgtctgctttaacactggcttcagaagtattgattccagatgatttctatagaatgtcccaccaaaaaatctataatgcgatgctggtgctcggagaccgaggtgaaccggttgatctggtgacagtcacatcagagcttgcgaacacagacctgctggaagaagtaggcggcatttcatatttgacagatatcgcaaactcggtgccgacagcggctaacatagaatattacgcgaaaatcgttgaggaaaaatcgattcttcgccgattaatcagaactgcgacaacgattgctcaagacgggtatacccgtgaggatgaggtagaggatttactcagtgaagcggaaaaaacgattatggaagtggcacagcgcaaaaacacgagtgccttccaaaatattaaggacgtccttgtccagacctatgataatatcgaacagcttcacaatcgaaaaggtgatatcacgggaattccaacagggtttacggagcttgaccggatgactgcgggtttccagcgcaacgacttgatcattgtggctgcccgtccttcagtagggaaaacagcctttgccctgaacatcgcacaaaacgtggcgacgaagaccgatgagagcgtagcgattttcagtcttgagatgggtgcagagcagctcgttatgcgtatgctttgtgccgagggaaatatcaatgcccagaatctccgtacaggtaacctgaccgaagaggattggggcaagctgacgatggcaatgggaagcctgtcgaacagcgggatttacatcgacgatacaccgggtattcgagtgagtgaaatccgtgccaagtgccgccgcttgaagcaggaaagcgggctgggcatgattttgatcgattacctgcaattgattcagggaagcggtcgttcaaaggacaaccgtcagcaggaagtatctgaaatttcccgtgaactgaagtcgattgccagggagctgcaagtccctgttatcgcgctttctcagctttccaggggtgttgagcagcgtcaggataaacgtccgatgatgtctgatatccgggaatcaggaagtatcgagcaggacgcggatattgtcgcgttcctttatcgtgatgactactatgacaaagaaaccgagaataaaaatattatcgaaattattatcgccaaacagcgtaacggcccggtgggaaccgtgtctcttgcgttcgtaaaagaatacaacaaattcgtcaacctggaacggctttttgatgacgcaggcgttccgcccggcgcataagccccaagagctgctcttggggttttttcattcgaaagatggaagaaataccgttcgctcagcggatgataatttgaaagcgttttaataaaatggtgcaaaaaggagatggtaacaatatgggaaaacgtttttcgtcttttcacgcagcacaagtccgaattgcacgtcctacgggtcagcttgatgagattattcgtttttacgaagagggactgtgtttgaaacgaataggagaattttcaaagcataacgggtatgacggtgtcatgttcggccttcctcatgccgattatcatttggaattcacccagtatgaagggggaagcactgctcccgttccccatcccgacagccttcttgttttttatgtgccgaatgcagatgaactggcagcgatcacttcaaagctaaagcatatgggctatcaagaggtcgaatcagagaacccgtactggagcaatgggggcgtgacgatagaggacccggacggctggcgggtcgtttttatgaattcaaaagggatatcaggcaagtgattctttcttatgctaaaggatgaaagtttcgcaagctttttatgacaaaacagtgagaaaacgcttataaaacgaatggaagcgaacgaatatagattttgaataatttaatgttcggatttacaattgactttctgtttcttcactgataaacttgatttgtttgaatagaatcgttttgaaaggttaacggaggtgcacggacatgtcttcagtagttgtagtaggtacgcaatggggcgatgaaggaaaaggtaaaattacagatttcctatcagaaaatgcagaagtgatcgcccgttatcaaggcggaaataacgcagggcatacaatcaagtttgacggaatcacatataagcttcacttaatcccgtctggaattttctataaggataaaacgtgtgtaatcggaaacggaatggttgtagatccgaaagcattagtcacagagcttgcgtatcttcatgagcgcaacgtgagtacagataatctgagaatcagcaacagagctcacgtcattctgccgtatcatttgaaattggatgaagtggaagaagagcgtaaaggggctaacaagatcggcacaacgaaaaaaggaatcggccctgcttacatggataaagcagcccgcatcggaattcgcatcgcggatctgttagaccgtgacgcgtttgcggaaaagcttgagcgcaatcttgaagaaaaaaaccgtcttctcgagaaaatgtacgagacagaagggtttaaacttgaggatatcttagacgaatattatgaatacggccagcagattaaaaaatatgtttgcgatacatctgttgtcttaaacgatgctcttgatgaagggcgccgtgtattatttgaaggcgcacaaggggttatgctcgatatcgaccaaggaacatacccgtttgttacgtcatctaacccggttgccggcggtgtcacgatcggttctggtgtcggcccgaccaaaatcaagcacgttgtcggtgtatcaaaagcatatacgactcgtgtcggcgacggtcctttcccgactgagctgaaagatgaaatcggcgatcaaatccgtgaagtcggacgcgaatatggaacaacaacaggccgcccgcgccgtgtcggctggtttgacagcgttgttgtccgccacgcccgccgtgtgagcggaattacagatctttctctgaactcaattgacgtcctaacaggaattgaaacgttgaaaatctgtgtggcgtaccgctacaaaggggaaatcattgaagaattcccagcaagtcttaaggcacttgctgaatgtgagccggtttatgaagaaatgccaggctggactgaggatattacaggtgcgaagagcttgagcgagcttccggaaaatgcgcgccattatcttgagcgcgtgtctcagctgacaggcattccgctttctattttctctgtcggtccagaccgctcacaaacaaatgtccttcgcagtgtgtaccgtgcgaactaaatagaatatgtctgcaagcccctatatcaggggcttgttttttgtttgaaagccgcatataagttggtctgagaaaaaaatatgaaaaaaaccaaaaaagttattgccacttctatttgttcgtgatattataaatctcgttgttacggaaactgcttcaatagagtacaagataagaactagatctaagtcgtttgctctatagaaattccgacatctttaagagccattagctcagttggtagagcatctgacttttaatcagagggtcgaaggttcgagtccttcatggctcaccatttcgtgaaggcccgttggtcaagcggttaagacaccgccctttcacggcggtaacacgggttcgaatcccgtacgggtcattgatttactttagcgttattgctaaattccttatttgtctgtgagagctgacacgacagctctccgggcaattactgtaaggtccggtagttcagttggttagaatgcctgcctgtcacgcaggaggtcgcgggttcgagtcccgtccggaccgccattttactttacttagtagagaaaaataaaacatttggctcggtagctcagttggtagagcaacggactgaaaatccgtgtgtcggcggttcgattccgtcccgagccacttaccaaacgcatctgcaatcgtaggtgcgttttttcttttaggaaaaaggcaaacatgaggagtgttataatagaagaaaaagggagaaccggcccttcggccggttcaaagaagaagacgtcattgataaagacgcactccggtgagaggaggtttcaataaagttatcttttttaaaaaaagttgaccagcatgacaatagataaacaactggcgataaaggtgaaacatgtgttttttttctaaacctttattttttttatcttttgaccttaaaccgttataatagacaaggacccattctttacatgggccataagtgatgaaacgaatgttatatagatgaaatgaagtcattcggcaggaggaaaatcaaaatgatggataaaaagatccttgtagtagatgatgaaaaaccgattgcagatatattggaatttaacttaagaaaagaaggctatgaagtgcactgtgcccacgacggaaacgaagccgttgaaatggtagaagagcttcagcctgatttaattcttttagatattatgctcccgaataaagacggcgttgaagtatgccgcgaagtcagaaagaaatacgatatgccaatcattatgctgacggctaaggattcagaaattgacaaggttatcgggcttgaaatcggtgctgatgactatgtcacaaaaccattcagcacacgtgagctcttggcacgtgtaaaagcgaacctgcgccgccagctgacaacagcgcctgcggaggaagagccttcctctaacgagattcatatcggctctctcgtcatcttccctgacgcgtacgttgtatcaaaacgagatgaaacaatcgaattgactcatcgtgagttcgaattgcttcattatttagcaaaacatatcggacaagtgatgacccgtgaacatttgcttcaaaccgtttggggctatgattacttcggcgatgtcagaacggttgacgtaacagtccgccggcttcgtgaaaaaatcgaggacaacccgagccatccaaattggatcgtcacacgccgcggtgtaggttattacttgagaaacccagaacaggactaatgcccatatgaataaggttggtttttttcggtcgatccaatttaagattaccttgatttatgtgcttttgattatcattgccatgcaaatcattggtgtgtattttgtcaatcaggtagagaagtcgctgatcagctcttatgaacaatcgttgaatcagcgaatcgacaacctttcttattatatcgaacaagaatataagagcgataacgacagtaccgtcataaaggatgacgtcagccgtattttgaatgacttcacgaaaagtgatgaggttcgggaaattagctttgtagataaaagctatgaagtggtcggttcttcaaagccgtacggtgaggaagtagctgggaaacaaacgaccgatctgatttttaaaagaattttttctaccaaacagtcgtatttaagaaaatattatgacccgaaaagcaaaatcagagttcttatttccgcgaagcccgtcatgactgaaaaccaagaggttgtgggcgcgatctatgttgtcgcgagtatggaagatgtctttaatcaaatgaagacgatcaacacgatactggcgtccggcacaggtttggcacttgttttgacggctcttctcggtatttttctggcaagaaccattacccacccgctttcagatatgcgaaagcaggcgatggagcttgcgaaagggaatttctcgaggaaggttaaaaagtacgggcatgatgaaattgggcagctagccacaacgtttaaccacttaacgagagagcttgaagatgcccaggcgatgactgaaggagaacgcagaaagctagcctctgtcattgcttatatgacagacggcgttatcgccacaaaccgaaacggagcgattattctcttaaacagcccggcgctggaactgttgaacgtttcacgtgaaacagccttagaaatgccgattacgagtttgctggggcttcaagagaattatacttttgaagatttagtggagcagcaggattctatgctgcttgaaattgagcgcgatgatgaattaacggtgcttcgcgtgaatttctctgtgattcaaagggaacacggcaaaattgatggtttaatcgctgtcatttacgatgtaaccgaacaagagaaaatggatcaggaacgcagagaattcgttgcgaatgtatcacatgagctgcggacgccgcttacgacaatgcgcagctatttagaagcgttagctgaaggcgcgtgggaaaataaagacattgctccccgcttcttaatggtgacgcaaaatgaaacagagcgtatgatccggcttgtcaatgatctgcttcagctgtcgaaatttgacagcaaggattatcaatttaaccgggaatggattcagattgtccggtttatgtcgcttattattgaccgttttgaaatgacaaaagagcagcatgtggagtttatccgcaatctgccggacagagatctgtacgtcgagattgaccaggataaaataacgcaggtgctcgataatattatttctaacgctttaaaatattcaccggaaggcggacatgtcacgttctcgattgatgtcaatgaagaggaagaacttctctatatcagcgtgaaggatgaagggatcggcattccgaaaaaagatgtcgaaaaagtctttgaccgcttctacagggtggataaagcgagaacgagaaaacttggcggcaccggtctgggattggcgattgccaaggaaatggtacaggcgcacggcggagatatttgggcggacagcatagaaggaaaaggcacgacgattacatttactcttccatataaagaggaacaagaggatgattgggatgaagcgtgaaaatataaaaacgatattacttacggtactcgtcgtcatcagtcttgtttttacatgggggatatggacgttccagccaaacttttctgaaggctcatcctcaacagagtctactgttcgtgtgaaacataaaatcgaaaaaaccactcaaaagctgtctgaaacggtaaggccaagggacatgtttatccatgatgacggcgctcattacaaagtggatgacaatgccctctatgaagaaatttggtctgacttgccacattgggatgtaaaaggaattaaagatatttcggatcagtatgacaagtctggattcaagagctggttttatggaataggcggttctgaagccaagcttgacttgcaattcagcgatacgattccgattgatattttccaaacgctgtttaaatggtctaatcagtcgtttgaatacagttcgtttgaccatattctgatcccgttcaatgaaacaaaagcgaacaagaagatctatttggtgtcttacagcaaacagctcattcttgaagtgacggttgaatcggcaaactaccggaacattatgaacgacttgaaaaacaggcaatcaaatatgccggcgttcagtttgttctccattggctcaaagaaagagtttttgctgccaaacaaaccgcttacgatggacaaaaaagaatttgtcactgaatcgattaaaacaaatacctttaagcaggctttgtttagcgatccgagcatcgtaagggaagattcgaattacaacaacagaaatgtgctgacagatgggatcagccgtttagatgtgaatctaagccagcgacaggtgcaattccagcagcgtaatttggtgcagagcacatcctatcaaacaggtgagttaatcaaaaagagccaaaaataccttgaggataccggaagctggacggatcactatcaatttttcagtatcaatgacagccagcagctgagtttctatatctttatggatcagatcccggtcattaacagcaccgccaaacctttcggagcgacatcggcgattacggtgcaatgggcgaatgatgatattctcagctataagcggccgaattacagtctcggaacgaatccgattaaaacaagtgaaacagagctcatgagcggcagcgaagtgaggatgctgctttcgaaacaaaccgcttatgatacggacaaaattgatcagatcttccttgcttatcaattggtatcaacatcaaccaacgatgatcctctcgttgaactggaaccggtttgggcgatgaaagtaaatggaaaaattgtgccgattacaaaggatttattgaggaaggagggggctaacagtggagtggaataagacaaaatcaatcttcatcgttgccttcctcattttagatattttcttaggctatcagttttttcaaaaatggcaggctaccggcaaagaatatgaagtcattaaaaatgatgtcgagcatgacatgaaggccgatcatatcacgtatgaaggtttgaataaggaagcgacagaaggttatcggatcacggcaaatcaaaagtctttctccaaggaggaaattgaggcgctgaaggatcaaaagcctttaatggacatgcctagtgatgatcataaagtaacgagcctgaaaatgaagtttgcaaatccaatcgccctatcaaagaaggatatcgaggacgatgctcaggcacttgtttcttcgaaaattcaagatggcgaaaaatataagctttggaaggttgataaatcgaagaaagaaattattttcttccaaacgtacgaaggtcattatatttaccaaaagaccgacaatccctctaatatgatcgggcaagtggtgctgcacttaaacggtaaaaacgaggttgtgtcatacgaccagactacgcttgagaccttcaagcaaatccagaaagaaagcttaattactgaaatggatgcggttgagctattgtactatcaaaatcaattaaaagaatacagcactgtgaagagctgtaaattcggctatgtagcacaatatccgctgacaagtacgcaggtgctggcgccggtatggagaattacggtcgagtacgagaaaaaagtgaacggtgagaaaaagacagtacaagagtattttactgtgaatgctttggagagtacgattttagatacagatcaatgaaaataatggagtgagacaaacatgagcttgcaatttagcgtacttgcgagcgggagtacgggaaatgcgttttacctcgaaacagaggatcacgcatttttagtggacgccggtttgagcggaaaagccatggatgggctgatggcgcagatcgggcgtaagctggatgatgtagacggcatttttgtgacgcatgagcatagtgaccatattaagggccttggtgtcgtcgccagaaagtacaagcttccgatctatgcgaatgagaagacttggaaagcgatggagaatcaaatcggcaaaattgacaccgatcaaaagtttgtatttccaatggagacggtgaagtcgttcggcggacttgatgttgaatcgtttggcgtttcccacgatgcggcggaaccgatgttttatgtgttccattataacggccgaaagctcgcgttaatgacagatacgggatatgtcagcgaccggatgaaaggcattatccgttcagcgaatgtatttgtgtttgaaagcaatcacgatgtcggtatgctgcaaatggggagatacccatggagcattaagcggcggattttaagtgacgtcgggcacgtttcaaatgaagatgctgccttggcgatgacggatgtcattggcgatgagacgtctcgtatttacctggcgcatttgagccaggacaacaacatgaaggagctggcaagaatgtccgtgcagcagacattggcttctaaaggatttgtgacgggtgagacatttgacttatacgacactgatccgaagaaggccactccgctttgcgctgtataatttttctatgtaaatcatgactattctaggagcttctaacccacaatataaccatattaacgttcttggaaaggatggaatatggtggattacgaacgtgaggaagaacatactactcctgaacagccaaagagaagcaaaaaaggatattttctttcaagcctgattggcgtgattgtcggtgccgtattaatggcgtttatcatgccgtacctttcaaatgaagggctagatacgggcgctttagatcagcagcagaacaataacggccgggaatcaatcaggacggtgaatgtcagtgtcaacaatacggtcaccaagattgtcagcaatgtgtcgcccgccgttgtcggtgttgtgaacatccaaaaatcagatatacggggagagagcggcgaggctgggagcggctctggcgtcatctataagaaaaatgaccattccgcttatgtcgtgaccaaccatcatgtcatcgaaggcgcttcccaaattgaaatcagcttgaaagacggctcacgtgtatcagctgatcttgtcggcagcgaccagctgatggaccttgccgttttacgggtgaaaagcgataagattaaagcagtcgccgatttcggaaattcagataaagtgaagtctggggagccggttatcgcgatcgggaacccgttaggccttgagtttgcaggctctgtcacacaaggcgtcatctcaggtacggagagggcgatcccagtggattcaaacggtgatggacagcctgactggaacgcagaagtcctgcaaacagatgcggccattaaccctgggaacagcggcggcgctttgttaaatatggatgggaaggtcattggcatcaattcaatgaaaattgccgagtcggcggttgaagggattggcctgtcgattccatctaagctcgtgatccctgtgatagaggatttagagagatacggaaaggtcaaacgcccgttccttggcattgagatgaaatccctaagcgacatcgcaagctatcattgggatgaaacattaaagcttcctaagaacgtcaccaatggagcggttgtgatgggtgtagacgccttttcacctgccggaaaagcggggctgaaggaactggatgtcatcacggaatttgacggatacaaagtaaatgatattgttgacctgcgaaaacggctttatcagaaaaaagtcggtgaccgggtgaaggtgaagttttaccgcggcggaaaagaaaaatctgttgacatcaagctgtcgtccgcagaccaattaggaagttaatcaaaacagtctggcatcgtttgccaggctgttttgatatgcaaaaaaactgaacgggggtcacgcccgttcagttgaaaaaggatatatcgaatatgaagaaaaatacaagatggatgttacacgtgaaacagcagcaaatggctgctaactgtaaatacctccattttcagcattctcccggaaatatggaggtacgggattaggctttgccataacgaaatcgattatcgacagtcacaatgggacgattgacgtgaaaagtgaaatcggcagaggcactgtttttctgatcaggcttcctgctccggattattcgttagacgagtgagaaaatttcttcagccgatattggaggctttgtctgctgatgccaagctcctgagcagctttcgagatgttatggccgtgttttcttaacacgttctctatcacatatttttcgaagctttccattttttcttttaagtccgcggctggctggtgtcttggtgtttccggctctgggatgtcagccggcttgattttcatgcggtattgatagggcagatgggaagccgtaatcgtttgctcgtccgtcatgaaattcattgcgccttcgatcatatgctcaagctcgcgaatatttcccggccagtcataagaaaggaaaaattgcttcacgtcatcgctgatgtgttcaacattcatttggaacagatggttgtttttctggatgaactccgacgcgagaagcaagatgtcttcttttcgttcccgaagcggcgggatgatcagtgtgacgacactcagcctataatacaagtccttccgcattcgttcgcctgcaattgcatcaattgggtcttcattcatcgtggcaataatacgtacgtcaatcggtgtatcctttgttgaaccgatgcgcctgattttccgttcttgaagggcgcgcagcagcttcgcctgaaggctgagatttagcgagttgatttcatctaacagcagtgtgccgccatgggcttgttcaaacaggccgggctggtcgacagcgccggtaaacgcgccttttttcgtcccaaacaaaatgctttcgacaaggctgtctggcagtgccgcacagttttgcgaaataaacgggccgccagaacgatcgcttccattatggatactttgcgcgaacagttcttttcccgtgccggtttcgcctgcgagaaggacagatgatgacgtacgggttgcccgcttggcgttttcgatgacgtcttgaatggccggactggtgccgagaatactgtcaaacgtataggttgtgctgccttttttgttcatattctccctgatcagccgttcaagctttgtcacatccttggcaatttcaacagcgcccctgattttgccgtcttggacgatgggatatgtatgattgatcgtcgtaatttcctggcctttattattgaaatagctctgtttgacgtttttaatcgtcttgccttcctgaagagcctgtaccagtgtgctgtcctgctgctttgaaaacataaacacatccatcaggtttttattcaagacgtcatgcttctccatatcttcaatctgcatcattttattgttataaacgattgtgtttccatgctcgtctaccacgtgcaggccaacatcgatttcatctaaaatgctctgaaaaaccaatgtgaggaattcgctgtctttgaccactgtatgaacctccctcagttttcttaatattgcttctattttataaaaaaatggagaggatatgcaaaagaattttgcacttaggatttgtattacagttaatcctaatatcgttttatcgtaaaggaaggaaatactggtgttgtatattgactggaaaaataaaatgttttattatttaggtaaatatctaaatcctaatgtttaccaaaggggggagaattatttgaataaggcttttaaagctctggccgatcctacaaggagaaggattttggatttgttaaaacaacaagatttaacagccgggcaaattgctgaccaatttgatatgtcaaaacctagtatttctcatcacttaaatattttaaagaacactgatttagtacgagaccaaaaaaagggacaatttattatttattctttaaatacgactgtacttcaagatcttattggctggtttttttcccttacagatacagaccatgacaagaaggaaggtggagaatgatgaaaaaatatttctttgcactaattatgatagccttaacaattttagcttgggttataacatattcacacttacctaatgaattggcaacacactggggtataagtggtgaagcagatgacttttcaaagaaacctacggccatagcaacgttggtaggtataatgatagtacaatatattcttatggtgcttattcctaaaattgatccccgacgaaactatccgacctttactcgtgcatacttatctatttttaataccatgtttctcgtcttatttctcattaatttgattacaatattgacggggctgggtattaaacttcctattccatatttaggttcatttattcttggagctatattcatggtttttggtaattttattcagcaggttagaccgaattttttcttgggaattagaactccttggacattaagcagtgaaaatgtatggaggcttacacatagattgagttcaagaatatttgttctagccggaatcattattgttttaactgcatttattcctgagtcttttaccgagccgattatttttatagcggcaataggtagtatactcttatccgtattcgcatcttatttcatatatcaaaaagagctaaataaatagccgggttatgtttcctatttaaagaggttagagtcttattctaacctctttttaactgggaaaaaataactaaatattaaaaaactcttcatttttcatatagcctatgataatatttttctgtattttatgggtttatttagaaataaataggataaattgtaatcgggagagtgttcagaattgaacgattttagtagtgataaaagtagaataggcctcttttttttaacaatttgtgcatgtctaacgatcttgcttttctcaagtatcatagttgcattaccgaaaaatcctctctcgacaactgttagagcagagtttttggtgaaacaatttattccacagggatgggggttttacagtagggatccaagatctgatcatctttatgcatacagtatgagtggagatacagatatgctttcatggccaaataacaaaataagaaatgtatttggacttaatagatatggcagagcacagggcatagaacttggattacttatttctaaactaccaagttcattaaagtggaaaacatgcgataaggatgcaaagaattgtcttgatgagatgaaggtacaagtggacattgcaaaccctacgcctaatgcttcactttgtggtgatctgggaatcgtaagcggaagtcttgttccatgggcatggagccaatataaggtcgttccaacttctaaggttatgagggtgaatgtaaaatgttcgaaacgttaaacattaaaatttataagtgggcaaatgataacgtaccttggaccaatgtctatggtttggcaagaagtattatggctttatctacagctttaacacttgctttaaatgattctagcattttctttagaccgggtgcaggacaagaaacaccgtattgtaatggaacatatagcattttttgtacagtgcctaataaccatatataccttaatttaatacgatggatttgtgtcatcttattactggttgttgtgtcaggctggaggcccagattgactggaattatacattggtggatatcttatagtttacaagtatccgctatgactattgatgggggagagcaagtgagtgcagtttttacgttactactcctgcctataactttgaccgattcaagaaaatggcattgggaaagtataaagactggtacagatctaatcaacaagaaagatttatattttcgcgtcatagcacttacaacttttgtatttattagaatccaaattgcaattttatattttaattcagctacggcaaaattagctgatcaagattggttaaatggaacggctgtttattattatgctcaagatccaatgttaggttttccgcctttattacataccttatttaatgactttttgtcatcacctttagttgtaattccaacttggggaactttaattattcaattgttattatttgcatttttattttcacctaaatcatatcgaaaatatatgtttattattgcaatacttatgcatgaaatttttgcagtaatgtttggtcttataagtttttcaatgattatgctaggtattttaattctctatttaaggcccttagaaaaacaatttcatttttcattaggaaaacggttttacattagccatttatttatgaaaaggggtgatgcaggaaagtcattatagatattgtttttgttgtcactagtcgtagccataggaataaaaatcgggaggagaaatggatatgcgtttagctgctcaagatttaaaacttaaattggtctatttaatgctcattgtgttggttgtatctatattttctggtgcaacacctattactcaagcaaagaatctacataaatactcaggtgaagaaatttttgctggaattgtttttggtcaaggtgaaatctcgaaaaaatttcctgaaatttggaacaccaacgattataatgttagaaattcagataaatctaaagaacttactcaattgttaataagtgaaatgaaaaaaatcgatcctcaatattttaacgatttgaaaaaatcggtttatgaaaaggatcttaaattaattgatgaggaattcagcaagggtggagatcttttaaaagaagctgctgagaaggttaacatgggcagttctgaacatgcggatttagtctcaggtaaatgtgttgaaactctgggtgctgctatttttgttttggtactagcagcaggtggcgctgtagactatctgtacgtttataatgcaactaaattttggggaataacttctaatgataaagagtctaaacttgcgacagagatgtttgttaaggatgttgcagataaactgaactaagaactataggtaaaaggcgtaatcataatttagattacgcctttttatagtggaaatatttcttataaatgtcattcttattttaattttttaattaaaaggatctttttatctggcttgtgaagaccttctttgttgatatattcatttgaactgcaaaataattttgcccttactgaagtctttttgctcgaaatatcagaatgtttttgcaccttgtcctcgaaaattgtagaaaacacacgaattcttgatttggcacagaacttgcatttatataaagggaaagcaggataacatgttgaaacagaaaacaagggggaattcaaatatgacagctttatctaaatccaaagaaattattgatcagacgtctcattacggagccaacaattatcatccgctcccgattgttatttctgaagcgctgggttcttgggtaaaggacccggaaggcaatgaatatatggatatgctgagtgcttattctgcggtaaaccaggggcacagacacccgaaaatcattcaggcattaaaggatcaggctgataaaatcaccctcacgtcacgcgcgtttcataacgatcagcttgggccgttttacgaaaaaacagctaaactgacaggcaaagagatgattctgccgatgaatacaggagccgaagcggttgaatccgcggtgaaagcggcgagacgctgggcgtatgaagtgaagggcgtagctgacaatcaagcggaaattatcgcatgtgtcgggaacttccacggccgcacgatgctggcggtatctctttcttctgaagaggaatataaacgaggattcggcccgatgcttccgggaatcaaactcattccttacggcgatgtggaagcgcttcgacaggccattacgccgaatacagcggcattcttgtttgaaccgattcaaggcgaagcgggtattgtaattccgccggaaggatttttacaggaagcggcggcgatttgtaaggaagagaatgtcttgtttattgcggatgaaattcaaacgggtctcggacgtacaggcaagacgtttgcctgtgactgggacggcattgttccggatatgtatatcttgggcaaagcgcttggcggcggtgtgttcccgatctcatgcattgcggcggaccgcgagatcttaggcgtgtttaaccctggctcacacggctccacatttggcggaaacccgcttgcatgtgcagtgtctattgcctcattggaagtgctggaggatgaaaagctggcggatcgttctcttgagcttggagaatactttaaaagcgagcttgagagcattgacaacccggttattaaagaagtccgcggcagagggctgtttatcggtgtggaattgactgaagcggcacgtccgtattgtgagcgtttgaaggaagaagggcttttatgcaaggaaacgcatgatacagtcattcgttttgcaccgccattaatcatttccaaagaggatttggattgggcgatagagaaaattaagcacgtgctgcaaaacgcataaatccgtaccatggcgggatattcacttcgtttgtataaatttacaacagaaaaatcagcactccctatttgctcagctacagtattttagtataatgtatctttatgagaagaagtgaattttatattaaatagatagagactctttggacagcaaactgggatagcaccatgcagatgttccagcttagatccaatacaagttgctgaaggggtgcagaatgtgaatacaaaccaagataacggaaatcagctccagcggacaatgaaatcacgccacttgttcatgatttcattgggcggagtgatcggaaccggtttcttccttggaaccgggtttaccattaaccaagcgggaccgctcggcgcggttctgtcctatttagtgggcggctttatcatgtttttgacgatgctctgcttaggagagctggcagtcgcctttcctgtgtcagggtccttccagacctatgcgacaaaatttatcagcccggccttcgggtttgcgttcggctggctgtactggctcggctgggcggttacatgcgccattgaattcttatcagcggggcagctgatgcaacgatggtttccgcatatagacgtgtggatctggtgtctggtctttgcggcactgatgtttattttaaatgcgatcaccacaaaagcctttgcggaatcagaattctggttttcaggcattaaaattttgattatccttttatttattattctcggcggagctgccatgtttggcctgattgatctgaagggcggagagcaggcgccgtttttgacacatttttatgaagacgggttatttccgaacggcataaaggcaatgctgattacgatgattaccgtgaactttgcgtttcaggggactgagctgatcggggttgcagccggagaaagtgaagaccctgaaaaaacgattccacggtcaatcaaacagacagtatggagaacgcttgtcttctttgtgctttcaatcattgtcattgccggcatgattccgtggaaacaggcgggtgtcgtggaaagtccatttgttgccgtatttgagcaaatcgggatcccatatgcagctgatatcatgaactttgttattttaatcgcgctgttatctgttgcgaattcaggtttatacgcatcgacacgtattctgtacgcgatggcgaatgaaggacaggccttcaaagcgctcggaaaaacaaatcagcgcggtgtaccgatgtactcgttaatcgtaacgatggctgtggcctgcctatcacttctgacaaagtttgcgcaggctgaaactgtatatatggtactgttatctttggcgggtatgagcgcgcaggtcggctggattacgatctcgctttcccaaatcatgtttagacgcaaatatatccgcgaaggcgggaagatagaagatttgaaatttaaaacaccgctgtacccggtgcttccgctgatcggcctaacattaaatacggtcgtgctcatcagtcttgcatttgatccggagcagcgtatcgcgctgtattgcggcgtaccgtttatggtcatttgctacatcatttatcatgtcgtcattaaaaaacgccagcaggcgaatcgtcagctagagctttaaaacgttgtccgtaagtcatctttgttagaacccgcataggacattatcttaaatgttgaggtggaatcacagatggataaaacgatttcggttattggaatgccaatggatttaggacaagcacgacgcggagtagatatgggcccgagtgccatccggtacgctcatctgatcgagcggctgtcagacatggggtatacggttgaagatctcggtgacattccgatcaaccgcgaaaaaatcaaaaatgacgaggaactgaaaaacctgaattccgttttggcgggaaatgaaaaactcgcgcaaaaggtcaacaaagtcattgaagagaaaaaattcccgcttgtcctgggcggtgaccacagtattgcgatcggcacgcttgcaggcacagcgaagcattacgataatctcggcgtcatctggtatgacgcgcacggcgatttgaatacacttgaaacttcaccatcgggcaatattcacggcatgccgctcgcggtcagcctcggcattggccacgagtcactggttaaccttgaaggctacgcgcctaaaatcaaaccggaaaacgtcgtcatcattggcgcccggtcacttgatgaaggggagcgcaagtacattaaggaaagcggcatgaaggtgtacacaatgcacgaaatcgaccgtcttggcatgacaaaggtcattgaagaaacccttgattatttatcagcatgtgatggcgtccatctgagccttgatctggacggacttgatccgaacgacgcaccgggtgtcggaacccctgtcgtcggcggcatcagctatcgggagagccatttggctatggaaatgctgtatgacgcaggcatcattacctcagccgaattcgttgaggttaacccgatccttgatcacaaaaacaaaacgggcaaaacagcagtagagctggtagaatctctgctagggaagaagctgctgtaataagaaaacccccgcacccgcgggggtttcagcgtgtcgacaaaccctcgcattcgttgtcaggcctgcgcttcggtgctcacgaattccaaacattcgctgcgctccaatgctcgttcttcctagacttcaagggttttcaatcacgctgaaaagatgaaagaatcctaaaactacaaaccgttttaggattctttcgttaaattgaacccccgcatcccgcgggggtttttcatttatccaatcattttctcagcgactttcatttcctgtgaatgggtttgatggtccgcaataaaccaacctgataaaatcaccgctgcgacgcctgcgccaatcagaaatcttttcatttatataacctccgttcgtttaatcagttcttcaatctgtaatgcttcataaaaaaagtgggcagcttctttgtaaagctcaagttccctataccgttcgccagccaaaatggaaagttctcttacactgtcatactctttctcggacaacaagtcatccatatgttgtttgcataagtgaaacgtttccgcatgacccccttctgcataaatggcatataaaatgtctatttttgcctcacatattctattcggctcagcagtcaatttttccttcacttcttggtaataagataaggcctgttctttctttttgatcttaaacagctctcgtatcagcaggtaggcagagtgataataataggcagagcgggcatactcatcgttctgtaaggcctcttctaatttcgaaaccgcttcttctgatttgccgctttgcgcatgaagaaggccgaagttatgcaaaagctgggcttcaaaaaaatgatcctctaattcactcgtgatccgaattgcttcgtccaaataagcctcagcttcttcaaactggctcatctctgtaaaattgcctgacatggtaatcagggctgaagccagcttctttttataatcggtctcttccctgaacgttttgaccgcttgccgtgtatgattgagggacacaatattttgtcccagcttataatagagctttccgaccttcaggtgaaattcagctttctcaatcggatcgggaatgttgtcgagatactgctctgcatctttatacagcccaatggcaatgtcataattatttttataggcctcatacatgccttcaaacagaaaaaagtaatatttcagcatgtcagacgtagcattcatatgagaaggctcctcatgctgaaagccctgtcctctcgcctcgtgaagcaaaaccttgtggcgcagttccaataaggagaagtaggcaagcacctcctgatcctcttccatgtcatccaataaaggcttcacttcttcaaataaacgggaggactcttccacttcatgtttcttgatagcaaggtaccaatcgttgagcatgctagcgatttctgcgggtgcgatcttattcatgtgaaactcctttctctagtgacttatcaatctcagttgcttattctgatagtaacacctctttctattttatgtaaaatcctctagtcaatatatgaaggagagatgatatgacaatcatgctgaccccaatgcagtcagaagaatttcggtcttatctcacatacacaacaaagcattacgcggaagaaaaggtaaaagcgggaacatggctgcctgaagatgcacagcttttgtctaagcaggcgtttactgatctgcttccgagagggctggaaacaccccatcaccatttgtggagcctcaagctgaatgaaaaggataccgttggctggctctggatacatgctgaaccggagcatccgcagcaggaagcgtttatttatgatttcgggttatatgaaccgtatcggggaaagggctacgcaaagcaagcattggcagcattagatcatacggcacgcagcatgggaatccgcaagctgtcccttcatgtctttgctcataatcagacggcgcgaaagctatatgagcaaaccggatttcaagaaacagacgtagtgatgagcaagaagatttaacgaaaagggcctgataaaggcctttttctgtaaacgatttctaaaaattctgtaaataacctagttactttccttattttcctaatataatgtgggtgaggaaattacctttcctacactcacaagaaaagaggagatgtaatgaagttgaagaaacgagtgtcgatgtttttggtagcgcttacaatgtgcggcggcctgtttgtttctcccgccaaagccgtaaagaccacaaattatgctgaagaaatcgccgcactgcagccaggcacgacaccggaagaaatcatgaaatctgccagccagattgccaaacaacagcacgtaaagcaggatgttatcctaaaacagttctataaggaaatcacggctgataaagcagagggagaccggctcgccaaggaaagcggcatgtctatcatgggcggctcgtccggcacgaaaaaactcccgacaagcgcgaaaggcaatatctattacacgaactcctacacagcctactacaatcacggccacgtcggcatgtactccgctgctgacaaaattgttgaatctgtcccgagcgacggcgtcaggcagatcgcttataatgccagagacgtggaagacaactccattgtgcaaaccgtcagcgtatcctcatctcaaaaaacagctgctgccgactgggcggtatcaaaagtaggcgacccatactcatttaacttcgtcaataacagaaataccggccatgacggcgccaaaaactgttcaaagctcctatggtctgcctttttgctgaaagcaggcattgatatagacagcaacggaggcttaggcgtgtatccgcgcgacatcacaagttcttcgtatacgacaaccatcatgaccatcaactaaggagaaggatatgaaaaagtggatgattaccatcgccatgctgattctcgcaggaatcgcactatttgtcttcatttttcctagccataaaactgtaagtcaccaggatcttcgagactccggtttcttggatgacaaagaagtcctgttatatttttcaacctctgcggatcaagatgcatttggcggcgggaaaagctatgccttgtttatcagccaggacgggtcgctgtcttcctttcagatgaagggccttgagctgggatcagccaaggttcacggcgacagtgtgatgctggaggacaaaaacaagatttatacgatcaaaaacggtctgcgctcccataaaagaacctatcagcacacaggcgacagcgcaggctttctgcaaaacacggacggcttttataccttatacaactccggctacgacaaaaagggagacgggtaccgctcagagctgtaccgccagatgaacggagagtggaaaaaagacgtcatcccctactacatccgggcctccggttttcataagggcaccatttacgcactcgttccgacaactgacgaaaaaggttatcagctccttcagattcaagcagatcaaaggaagctcacttatcacaagataacagaatggcagtaccgggaaggagcctcagtcgaatcccagcttgctgtggacgaccaagctgtttatgttatggttcgcggccaaaaagcccgcaatctctatcaaatggtcaagatcaacaaaaaaagcggcaaagtagagctgcacgacatcgacgaatacaaaaacgacgaacaaacgatatacagctccatgcccttcagctttaaaaacagctttttcccttatgacgggaacctgtatttcattgacggcttcggaaaggtacacaaaattgatgccaagacaggaaaaacaagcatcgccttcaccttttcccaggacaaaatgaaagccgatttcaaagaaatcacccaaaaaggcagcagcctctatttcttcacatacacgcataacaagcctgcctacattgaacagtacagcctgaaaaccggaaagaaattgaaagaaaaagagattgggaaggtaaaggatgtcgtgacgccgaagagtcatttgaagctgtatgattttgaggtgatgaagaggttttaaggcaaggagggtagtatgggagccatcgccgttttatttatcgtttttggttttccgatcatcgcaggtgtatttggtatagcgggtcattttttatttaagagattttgggtggcaccgctcatcgtccttatcgcgagcttgatattgttagttacgttagcttcgggcaatagctcattcttgttttgggttgttatgtatacggggattgcgttagcagccagtgttgtcacattatttctcaggaaattttttgagtgatctctgtttatgaagagactggtatgaagtctctttttttgttgaaccgaagtttgcagagattttgggtatgttttagaaacgaatctaaaggagggattacatgcgcaccaaacgggttattcttctggcagtaatgatcagcctggtttcggccattactgtattcctgttaaatggatgtaaagtcgacttcttagacatcggcggaaccattattggctgctttcttggcatatttgttgttataagaatacagaaaaaacagtcgtgaaaaagggaaagagtcatgccgaaccgaagtcatgttcaaggaccaagagtccaaaaacatgaatgggaggaatggcgttgacaggaaacaaagcggttgtgtacaaaggcaaagggactgtagcggtggaggatatcggttatccggagttaatcttgagggacgggcccggcgtcccgaaggcgaatgtgaatcgaaaatgtgagcatggggttattctcaaagtcattacaaccaacatttgcggaagcgaccagcatatggtcagaggccgcacaacggcgcctgaaggcttggtgctcgggcatgaaatcaccggagaagtcattgaaacggggcgtgatgtcgaatttatcaaaaagggcgatatcgtatccgttcctttcaatattgcctgcggacgctgtgtgatgtgcaaaacgcagaaaacgcatgtgtgcctgaatgtcaatccggatcggccgggatctgcttacggctacgtcgatatgggcggctggatcggcggccagtctgaatacgtcatggtgccatacgctgactttcagcttttggtattccctgataaagaacaggcgttagaaaagattctcgatttgaccatgctgtccgacattttcccgaccggcttccatggagcttacacagcgggcgtgcaaacaggttcaaccgtttacatcgcgggagcggggcctgtcggcttggcagctgcacactccgctcagctcctaggcgcctccaccgtgattgtcggcgatctgaacgaagacagactggcacaggcaagaagcttcggctgtgaaacggtcaacgtgcaaaaacacgaccgcctcggcgagcaaattgaacaaatactaggtgaaccgaccgttgatgccgcagtggactgtgtcggctttgaagcatctggccacggcaatcaaggggaagcgcctgccgccgtgctgaactcgatcatggacgtcacccaggtcggaggcagcctcggcattccaggcttatacgtgaccgaagatcccggcgcaaaggatgcggacgctaaaacaggctcactaaaaatccgattcggactcggctgggccaaagcccacaccttcgtcaccggacaaacacctgccatgacatacaaccgcaatttgatgaaagcgatcctgagcggcagagcgcagatcgcaaaagccgtcaacgccaccgtcatttctctggacgacgcgccaaaaggctacagcgactttgacaaaggcgcagccaaaaaattcgtcatcgacccgcatgggacattgaagtaaaagaaaaagccggacgttctcagaacgccggctttattgctggtaatctgtttcttcaaagcgatctcctgattcgtcttggacaattaaatccccttcgattttgtccagtccaatcaaaatataagggtttttctcatttgccgtaggagcaggttttcgtttcacagttacaatcgtttctttaggtgagaatttgacgtctgacacttcaagcttcttatctttctcgctgcttccgagagacacaataaccatttttctcccttctaaaatggtgaagacttgatatcctttcacgtcatcatgcatttggagataattagcgtatatttctaagtctggactgccttcaccgattcgatccttctctaacacccaataagacggctgacacccagcaagcagcaacatgatcacaaaaagccaaacccatctaaagcgcaaatgcaaacctccccacacatcggttacatccaaactaacatacgggcgaaatagagtcatcaacagcttgtttgtcgaattgtggataaaactcagcccgaagcactactaacatgtgaataaataggttatattgagaagagaacaattgtaaaaatggaagaaacatcggaggatttgaacatgaaacaagcgtattattcctgtgaagaacacatcgaaacggtgctggatatgtacatagacgaccacgagctgccgcccgaaatcagaaaaatcgaacatactaacagtttatccacagcctgtgaattatgtggagaccccgcagtatatatagtggggaacgaatgatcttacacaaaatacagaaaagatatccacaattgtggacaacatatatgaataacttgtttttaaagtggggatgacctgtgaatatcaatattgtgacaatcggaaaactaaaagaaaaatacctcaagcaaggcattgaagaatacaccaaacgactttcggcctacgcaaaaatcgacatcatcgaactcccggacgaaaaagcgccggaaaacctaagcgaccaggacatgaaaatcataaaagacaaagaaggcgaccgcatcctatccaaaatcagccccgacgcccatgtcatcgccctcgccatcgaaggaaaaatgaaaacatccgaagaactagccgatacaatagataagctggctacatatggaaaaagcaaagtcaccttcgtcatcggcggatcactcggattgagtgacacggtgatgaagcgagcggacgagaagctatcgttctcgaagatgacatttcctcatcagttgatgcgtctcatactagtcgagcagatttatcgggcttttcggattaatcggggggagccttatcataagtgagtgaagttttaaaaaatactttggactttttagcaaatagattagctaaatctatttgtaaattagagttagcacaattaaaactccagaagatattatctatgctagagaaaatcgaaagatgaaataattgatttaaaatccggaacaatagaactaagtactaacatttcttcttcatcaggaaacataaggtacaacttctattttgaaatgatacagagggaatgcataaaattttaggagtgtcaaatatgatagtaggtcttctatgtaggcattacaaaatttaccaaggacttaactttatacctatctgcaacgactatgaaaatccgttcactttatttataggcaataatgccgtagggaaaagttcagtattagaaagtttaaatactttttttaataatggttattggaatagaacgaaaagtacaaaatcagatgaggcttttattgctccagtttttctaataaggaaagatgaaataaaagaaaatattgatgaagagtattaccaagtcttgttgaatcttagcaattatttctgggaggtaacagaggaagctaatggtaatttaaggaataatgaggtatttgagaagttttttcagtttcgagatgagttgaaatatagatacggtaaggatacctatttatttttcattttaggtttagattatactgaaaaatccaaagtatactatagtacatttactacacatttagataatagtttaaatgaaagcggaattgattgccgggatataatgataattaacgctataagagagtattattcttatatatacataccagtagagtctattacaagtgaaatcattaaaattgaaaataaagaaatgcaagatttaatgagtacagatatactgtatgaaattgataatatattaaatgaaaaaacttttacaaagaaaaatggtacaactagaaaagttagtttgatggaatatctgaacactaatttagatgattacatgaatacaataaatcaaacaataggattaattgatgaaagttatgcttacaaagtagagcatgattataaaaagaacttgaaaccttccgatgtaagaaatcgaatattagaagcatatttctctattagaaccctaaaaaaagataaaaaagagatatatgaattgagctctggagaacagagaatcgcattaatagatattgctacagcattcttgcaaaataagtcagataataacaaaagaaaaacaatattggcaatagatgaaccagaaaattcgctacatattactaaagcatttggacaatttgataggttatataatcttgtaggaaagaatcaattattattgacaacgcattggtatggttctttacctataacgagtataggaaatgtacaacatttagacgtaaagaccgaaagagagaataaagtctatataaatacatttgatttaaataattattttgaaaaacgaggatctctacctgaagatatacagatgaaaagttatttcgatcttacatcatcaatactaagttcaattagatctgatcagtgtaattggattatttgtgaagggagtgatgacaaactttatttatctcattatttaaatgaagttgagaacctccgattattaagtgttggtggttgtggtaatgtaattaaagtatatcgatatttatttactcctttcttagaaaaagatgaaaagagagctatagaaagtaaggtactctgtttaatagatactgatgatataatgcatgatttggaaataagcagtgacataaaaggtaaattaaaactagcaagaattcagcctgaaagaaatggaactattaagttgcaagcagtatcaaaatcgggatactactcacctacagagatggaagattgtttaagtcctttaaaatattataattctattaaagaagtagttatgaacacagatgatcaagaactaaaagatatttttaataagtttaaatttaaagaaggttctacctcttcacgagttaaaaatgaagaattctctatattagaacctaaagaattagtaccttataatgaaaaaaaacgtatatttaattttttagatgatcattataataaatttttaattgcgaagcagtatacatctaaagaaagaggagaattacctgtcctgtttaatttaataaaaaaatatatagaggaataaagatgtatcataagtgaatgctaaacatgaacgtgattggactttttattaaataacactactttaaaaggggtgttgaattttggaaataggcgaatttgtaaataattttaaaaaccatccaatactctttgtaggaacgggtataagcctaagatatttagagaattcatttacatgggatggattattatcttatatctctaaccaattaaaaggaaatgatgagttttattatgatttaaaatataaataccaagttaacggagaatatgattatccaaaaattgcaacagatctcgagagagaatttgatttaatcttgcaaactgatagaaatggtaagttcaaaaaaataaatgataggttttacgaaaatattaaaaagggtgtaaacattagccgttttaaattgtttattactgatctcctaaacaattattctataaaagaaagtaaacgagaggaaatgttagaattacaaaaggttagaaaaaatattggttcaataattacaactaattatgatacttttattgaagatatattcgaatttaaaccacttataggtaatgaaattttgctaagtaatccttatggttcagcatataaaatacatggttgtattaatgaacctgataagattattataactaacaacgattatataattttcaatgaaaagtatgagctaataagggcacaattattatcactttttattcatagcccgataatttttttaggttataatttaggagataaaaatatcaaaagcatcttaaaaacaatatttacttatgttgatgcttcttcagaaatggccaaaaaaattagaagtaatttcttgttagtagaatatgaagaaaactcctctaatttagaagtagttgaacatgatattgatattgaaggaatggctactattagaatcaacaaattaaaaactgataactatactgaactttatagacatttagagaaactaagcttacctgtttctgcaatggacattagaaaagttcaaaatgtagttaaggaaatttttgcaggaggggatattaaggttagtataacagaggatattgatagcttaaaaaatggagaaaaagtattagctattggatccctgaaaactattaaatatgaatatcatactgcagaagaaatgatgatgaattattttaaaataattgaggaatcaaatcaccaattgttaagattaattgaaaaacatagaatacaaaggaatcaatttttccctatatttggtttttttagaattcaacaagaaatttctaatttcgaacggctaaaacagatacagctagctaaaattaaatccttaaaagaattgaatgatttcgctcctaaccatcatagtattcagagtatatatgatgatcaaactatttcaaattctaataaaatttcagctatagtcaaaggggttcttgctagaagaattgaaatttctgatttggaaaccttcttgaaaagctttcaaaataaaaaggaaacagattataaaaaactattgtgtgtatatgattatgtaaaatattatacatgagtcagcagctgaattgactctattatgaagatcaagttatatttacttggtaattaaatattcttgatcaaaaatataagtaaaaaaagaccaagaaaaaaatcttttggtctttttctatagcaaaaaactcacttttttatagcagtttcaccaacacctcatctatccaatcgaacaactcttccaaattataatctccgtcatgtccctgaccaaacagtttttttattttttctgcctacctttactggagcatatcatcatcgtgaaatcctatccctcacttcatataccgatactcccgcaaactctccaaaatagcaacttcctgcagcagttcctcacccacattcgtttccttcactttcttccgctcgagctctttgtccactaatcgcttcaccgttaagacatcggttccggtgcttaggacttctgccttggagttgaagtgtttatgggcgacgagctgcatgccgtaggagttgtatagcagcgtgtagccggcgatgcctgttgtggattggtaggctttggagaagccgccgtcgatgacgatcatttttccgtttgctttgattgggtcttctccttcgatttcttttacgggtgtatggccgttgatgatatggccgtgatctggattgaggccgaattctgccaggatgtttcggcaggttgcctcgtcttctcgtaaataataatacgggtttttcttttctttatgcgtttccttctctttaatgaaataccgctcaaatgttgtcatggcgcgttttccaaagagagaggagtactcgcctgtccataaataccaggccatatcagtcgccagatcatcggtttcttccgggtgggcaaaggcttcccgcaagaatcgttcaaatacatcgagcagctcacggcccgcatacggtttatcctcaatcatcatcgtttccatattgccgttttcatcgacaggaatacagccgtgaatcaacaggttgccgttatattttaaataaaggctgccttttttcatcataaaattcatatggcggcccagcttttcggaatgctggacagagaatagcagcttgtctatgacttctgcttcttcttctaatagctgatctggctgctccggattaatcgtcgcaaagcaggtgttttccagttgatatgttttaccgttcagcgtgatttcatttttgtcataatctattttctctaataacagccgctcttccatattaaagttcggccgtctcttgataatcgggctctcaagcttgaattggatcatcgcaatcgcctgatggatttttgtgatttgcttaatctcatcctctggcctgttgtcgtctgcttttggacggaatgctggattatcatcgtaatatttttcggccaggttcagcagcggtctcaggttgatgccgtacacgtcttcaataatatccaagttatcgtagcgggcacagatgcggataatattggccaagcacactttggacccggcataggctccgatccaaaggacatcgtgatttccccactgaatatcgacagaatgatagttgatcagttcttccataatcctatccggctgcgggccgcggtcgtaaatatcgccgaccacatgcagatggtcgaccaccagccgctgaacgctgtaagcaaggccggtgatcagcttatcggcttggccaagctcaatgatctgatcaatgatttcggagtaatattgctccttgttgcctgcttgttctgttttgtatagcagctcctccgtaatataagcaaactgagtaggcagtgctttgcgcagtttggagcgggtatacttggaggagcaatatgaaacgagcttaatcattcggttaatcgtttctttataccactcgtttaatgctgctttcgcatcaaagtcatgtttgattaacttcagtttgtcttccggataatagaccagtgctgctaattcatcgatttctctatcgtaaatgacaccgctgaagatgtcgcgtatcttctctttgactcgtcctgaaccattgcgcagcacgtgctggaatgcctgatactccccgtgcaaatcactgacaaaatgctcggtgccttttggcaggttcaatatcgctttcaaattaatgatttctgttaccactttttcttcacaatcgtatttttgtgcgagtagatctaggtacttgctttccaaaatcgtccatcccctttttagaataaacccctatttatgagcatgtgcatgataaggtgaatttaaaagtatgacattatttttaaacattggacctttatatgatagtaccgcataactgcttttatagacaattgaaacgagtgaaagattaaggcagctagagctgaaaaacctttcagcagaatctacggaggaggttatttagtcaagggcttaggctaaaaggttcagtatcctccttattgttgttatcaatatgcattgatatggtattgacgatccatttatttagcttgttgtcggttatcttgtaaggaattgccttgaggaaactgccgttgttgtacattgagtgttatatattgtaaactagagtaaaagatatccagattaatcatcgaaaaacatttcttacagttccaaaccggaaacgaaagaggtacctcgaaaatacaaatatttcctaggagtatgtatatgaatatagcgaattacactttaaaagtgaaaggcaaaacgttacttcaggacaccgacttgcatttttcgagcgggaaaattaatcacgttgtcggaaaaaatggagtcggtaaatcacagcttgctaaagactttttgttaaataatagcaaaagaatcggcagagatattcgtcaaaatgtttctttaatatccagctcttcgaatatacctaatgatgtttctaaggactttttattacactttttgagtaaaaaatttgatgcagaaatgatagataaaatcgcacatttacttaatctggataatattgatggaaaagttctgatcaaaaatttgagtgatggacaaaagcaaaaattaaaattgctcagtttcttattagaggataaaaatattattgttttagatgaaataacgaattcattagacaaaaaaacggttatagagattcatggcttcttaaacaagtatattcaggagaaccccgagaagattatcatcaacattacacatgatttgtctgatttaaaggcgatagaaggggattattatatatttaatcaccaagaaattcaacaatatcattcagtggataaattaattgaagtgtatataaatgagtaataaaacagtgggggcttgagatgaaattagagtttaaaaagagtattagcaacaaagttatcattattttaggagcaatgtttgtatttttatttttgctgggttattttttacttgttggaattgataaagtcagcaatgttacacctgaaatgtttttctttagctcctatactgttgcgacccagtttggtttgatgttattttcatttgttatagctttctttattaatagagagtattcaaacaaaaatattctcttttacaagttaattggagagaacatctatactttcttttataaaaagatagctgttttatttttggaatgttttgcatttataacgctaggcctgctaatcatatcgttgatgtaccatgatttttcgcattttgcattattactttttttattttctgcagttatactgcagtatattctaattatcggaactataagcatgttatgtcctaatatattaattagtataggtgtcagtatcgtttattggatgacttctgttatcttagtagctataagcaataaaacgtttggtttcattgctccttttgaggcaggtaacactatgtatccccgaatagaaagagtgctgcaatctgataacatgacacttgggagtaatgatgttttatttattattttgtatttagtttcaattattatcataaatgcgattatccttcgcttttctaaaactagatggatcaaaatgggcatttaataaaggaagctacttcacagtgaagtagctttttttgaacataatatttggtggagaattattaaaagaaatcctattagataccgaatttcacaataaaaaactattagcctgcaccacaaactgcgactgcttataattatacgaaatcttcgagtaatcaaacggctgcccatttgtcaggtgaaaaatactttctatatacagcttcggcagtccagcctctaatcccaaatattccgcttcttcctcattaagctggcccacgtgcagaaacaaatcagaaaaaccaatcttcaaccccagtccttcccggatgtaatggaagatggagtgggaaacgatttcgttgtttaaatacgtcacgatggatttgttgtaataggattcttcgtagcaaagggtctggccgttgatgtagcggacccttttgacatagtagatgtcttcgtttatttcgatgttcagattttccgccgcttccggtgtcggctttctcacgtccagttcgatgacttttgaggtgacgttgaaatcctcgagatcttttttaaacccctgattcgacagaaggctgatatagccttttcgtttatgttttctgacgaaaatgccgcttcctctgacttgaaagatcgcgcctttttgctctaatagctcgagggactttgtaattgtgcttttgctgacttcaaactgggccatgagggtttccaggactggcagtttgtctccctgctgaagctggtgttcttctatatatgtttcaatttccgctgcgatttgctggtattttaacatacgcattcctcatttattcgtttaatttcacttgtcaaaattatagcataaaccgcttacaatgatagttagtccgtaaatattttgtttcggtattgataaattataccggtacaattataatgaaagcgcaaccaaaacaaaggggtgggtgaaaatgtcggggaaagtgagagattatacgagactagcaaaagacattttagaggccgtaggcggggaagagaatgtgattggggcttctcgctgcgctaccagacttcgattggtgcagaagcggtctacccctaaagcgaaggaaaacgtgaaatcgatgccaccatcccgggtcattacggttgtcaaagcatgcgattgacctgcgttcagcgtcgaattgcttgcgcacatcgggctggatacggtgacattagacggcaggcctttttccttgaaggtaaaagaaggcgataccgtcaaaaaaggcgaagtgcttgttgagtttgataaagctttcattgaagagattgaggaaagtgcattacatcaaaaaatatttacagtcgtaagctgaggaggaattaaacatgggaaacatgccgaaggattttttatggggcggtgctttagctgcccaccaatttgaaggcggatggaatcaaggcggtaaagggccgagtgtcgtcgatgtgatgacagcgggtgcgcacggcgtgccgagaaaaatcacggatacgattgaagaaaacgaattttatccaaaccatgaagccattgatttctatcacagatacaaggaagatatcgctttgtttgcggaaatgggattaaaatgcctgcggacgtccatcggctggagccggatttttccgaaaggcgatgaggctgaaccgaacgaagctggtttgcagttttatgatgatgtgtttgatgaattgctgaagcatgggatcgagccggtcattaccctgtctcactttgaaatgccgctgcacctggcaagagaatatggcggcttcagaaaccggaaagtcgtggacttcttcgtcaactttgcagatgcttgctttacccgttacaaagagaaagtgaagtactggatgacatttaacgagatcaacaaccaaatggatgtgaacaatccgttgttcctatggacgaattcaggtgttgtggttggcgaaaacgaaaacgccaaggaggtcatgtatcaaacggcacaccacgaactagtggcgagcgcattagcagtggcaaaaggaaaagacatcaatccagagttccagatcggggccatggtatcacacgtgccgatttatcctttctcctccaatcctaaagatgtgatgctggctgaagaagaaatgaggcagcgctatttcttccctgatgtgcaggtgcgcggttattatccaagctacgcgttgaaggaatttgaacgcgaaggctacaacatcacattcgaagacggcgatgatgagattttaagaaacggaaccgtcgattacttaggcttcagctattacatgtcaacaactgtgaaaagcgatgtgaaaaatgataacactgacgatattgtaaatggcggcttgccgaatggtgtcgaaaatccgtacatcacttcgagtgactggggatgggcgattgatccaaccgggctgagatatacgttaaatcgtttttatgaccgataccaaatcccgttattcatcgttgaaaatggctttggcgcagtggatacgctggaggaggacggcaaggttcatgatccggagcgcattcaatatttaaaatcgcatattgaagcattgaaaaaagcggtcacgtacgatggtgttgatttaattggctacacgccgtggggcattattgatattgtctccttcacaactggcgaaatgaaaaaacgctacggcatgatctatgttgatcgtgacaatgaaggaaacggatccatgaaacgatataagaaagactcctttgagtggtacaaaaatgtcattcaaacgaacggcgaggaactataagaagctggcccgaatcgagcacttttaccgtagtgcctggttcgggttttttctgtagaaaaagaaaaatccgctatcctgccaatctggcaaaataacggatttttttatcagttacggattaggtaatcaaacgcgccgagggcggcagttgcacctgatcccatagaaataataatttggttgtacgcactgtctgtgcagtcgccggcagcaaataagcctggtacgcttgttgcgccatgtttgtcgacgatgatttcgcccatgcggttgcgttcaaccgttccttctaaccattctgtgtttggcacgagaccgatttggacgaatacaccttgaagttcaacgtgtttttcttcgcctgtttcgcggtctacatatgtgatgccgttaacactctgatcacctgtgatttcttttgtttgtgcgtttttcacgacagtaacgttaggcaggctgtagagacgtttttgcaggacttcgtctgctttcagttccggcgcgaattctagtacagtaacgtgattgacaatacctgcaagatcaatcgctgcttcgataccagagtttccgccgccgattaccgcaacgtctttgccttcaaacaatggcccatcacagtgcgggcagtatgcgacacctttgtttttgaactcttgttcacctggtacgttgacattgcgccagcgtgcacctgttgaaaggatcactgttttacttttcagaacagcgccgttttcgagttcaagttcgaacagatctttcttctcaaggcgtttcgcacgctgaaggttcatgacatcaatatcatattccttcacatgctcttcaagacttgccgcaagcttcggtccttccgtcgctttgacgctgatgaagttttcgatgctcatggtgtcgagcacctgtccgccgaagcgctcagcgacaacaccagtgcggatgcctttacgtgcagtgtagatcgctgcacttgcaccagcaggtccgcctccgaccacaagaacgtcaaacggctctttgtcagcaaactcagatgcatctgtgccgctgcccattttcgcaagaatttcttcaagcgtcatacggccgcttccgaaggattcgccattcaggtaaacggtcggcactgccatgatgtttttgctttcaacttctgctttgtatgctgcaccgtcaatcatcgtgtgcgtaatgttcggattcagcacgctcatcatgtttaaagcttgtacaacatcaggacagttgtggcatgtcaggctgatataagattcgaagtggtattcaccgctgatcttcttcacctgatcaatgactttttggtccaccttaggcggtctgccgctcacttggagcaacgccaacactaatgatgtgaattcgtggcccagagggataccagcgaaagttacgccagtgtcttctccgacacgattgacactgaagcttggcgttctgtttaattcagctttttcaactgaaattttcgatgacatggaagccagctcatcaacgagagccagcatgtcctttgaaatgtcatcttcgcctgcgctaactttgagaacaatgtcattctcaattagctgcatatattgatttaattgtgctttgatatttgcatcaagtaccaattgaatgcactccttagattttacctactagatcaaggctaggtgtaagagtttctccgccttcttcccatttcgctgggcaaacttcacctgggttttgacgaacgtattgagctgcttttactttgtttacaaggttgcttgcgtcacggccgataccgcctgcattgatttcaacagtttggataacgccatctggatcgatgatgaatgttccgcggtcagcaaggccagtttcttcgtcaagaacatcgaagttgcgagagatcgtttgagatgggtcgccgatcattgcgtaagtgattttgctgattttttcagagctgtcatgccagcctttgtgtacgaagtgagtatctgtagaaacagagtagacttcaacacctaattctttaagagcagcatattgttcttgaagatcttcaagctcagttgggcatacgaaagagaaatctgctgggtagaagcagaatacgctccattggcctttcaaatcttcgtttgttacatcgatgaattcaccgtttttgaatgcttttgcttcgaatggaagtacttctttaccgattaaagacataatgtatattcctcctaaaaatgtattagaaagcataatcgctttcaataataattctaattatatatgaattattaattaatatatattttttgtcaagccataacctactttttttcatcttaataaaggtgtgacaggtaggatttaggcatttcttttataacaaatgagaggctgattctcaattagacaaggttttcagggacttttgtaaatcagaatgacaggccgttttggcatttgaacattttatgacaccatgggcaagggcaaaggacaatggccaaaagcagaatagaacggaacagcaagctgctgtcacatgatggtcttggggattgtttctagctattattgtatcactgtttatgatatttaaaacataacttatgtcttctgttgtttgggatagaagaaaaaaacacggttcagttgaaactgaccgtgtttttgatgacaggttattcagaccaattcgtatggaaaacgccgtccatatcagtccgttcgtacgtatgagcgccaaagtaatcgcgctgcgcctgcaagaggttcgcattggaacgccctgtgcggtagccgtcgtaataagagagcgcggtagttaagcatgggaaagagattccggtgctgataccctcgcaaacgacttttcgcaggcctgtttgataggcatggagcttatctgtgaaataaggcgcgatcagcaggttagccagatttggctgctcactgaatgcttcgctgatcacgtttaggaaatcagcgcggatgatgcagccgcctcggaaaatcaaggcgatgtctttgagcggcagattccagccgtaaagctcagatgacatcttatattgggcaaagccttgtgcataggcgcatactttccccatgtaaagagcctgtctgacgtattcaatccaagtgtctttatccaagtgtttttcttcggcttccgggcctgctaatacatcttgagctgccatccgttcttcttttaaagatgacaagtagcgggcgaacaaggactctgtgatgatcgtggacgggatgccgttatcaatcgcctgcatgctcgtccattttccggtgcctttttggccggttttatcaaggatgacatcgatcagaggctgtcctgttttttcgtcttttttgcgtaaaatctcagctgtaatctctattaaatagcttttcagctcaccttgattccatgtttcaaaaatagatgcaatttcatctagcggcagacgaagcgtttctcttagaaacgtataagcttctgcaatcagctgcatgtcggcatattcaatgccgttgtgcaccatttttgtaaagtgccctgccccttttggtccgatatagacacagcaagggtcatctccgacttgggctgcgattttcgtcaggataggagcggctttctcatagacgtcgcgatctccgcccggcatgatggaaggccctgttaacgcaccgacttcaccgccggaaatgccgactcccaggtagccgatccctttttccttcagctcgtcatatcttctttctgtgtcttcatagtgggagtttcctccgtccatgatgacgtcgccttcttcaagcaaaggctttaatgattggatgacggaatctacgggttttcccgctgtgaccatcaaaaagatttttcttggtttttctaacgattgaacaaagtcctcaagctcgtaatacgggctgagagattgtccatccagcttttggataagctggtccgttaaatctctggtgtaattatagacagcgacgttttcgcctttatttgccatgtttaaggcgatgttgcttcccattacgcctaagcctatgacaccaatcgaattgaacatgtgttacagctccttcttaatttcatacaactaaacttaacaataaaatgaatcccagtccagcaacggaaataatggtttccagcaatgtccatgtggcgaatgtttctttcatgcttaatccgaagtattccttgaacatccagaagccggcgtcattgacgtgtgaagcgatgacacttccggcacctgttgcgagcacgactaacgccaggttaacatcagaatggcccaataacgggatgaccagacctgttgtgcttagtgcggcaacagtcgctgatcctagagaaatgcgcaggatcgctgcgatgagccatgccagaatgattggcgataatgccgttcctttgaataagtctgctacgtaatcgccgacaccgccgttgatcagcacttgtttgaaggcgccgcctcctccgatgatcaaaagcatcatgccgatttgtgaaatggcagttgaacaagaatccatcacggttttgactggaatattgcgcttgatgcccattgtatagactgcgaccaataacgaaataatcatagcagtcgatgcgtttccaatcaatctgataaaagctaaaactccgttatcttcaaacccgattgtttcttgaagcaggtcgataatggtcgcgaccgacatgatgataatcgggagcattgcagtaaagacactgattccaaagccgggtgtttcttcaaggttaaatgttttttgtgtgccgagtgatgcaatattgccgtttttcgcaaatgatgcaggaacgatttttttcgcgaactttgtaaataacggccctgcaatgagcactgtcggaacagcaacgataaagccgtacagcagcacttctccaatgtttgcgccatactcaccggcgatcgccgtaggtcccgggtgcggcggcaggaaaccgtgtgtgacggatagtgccgcgaccatcgggattccgagaaataaaatagaaatcttcaattctcttgaaatcgcaaagacaatcggaattaatagaaccagtcctacttcaaaaaataacgcaatcccaataataaatgaggcaatgacaacggcccattgaatatttttctcaccgaatttgttgacgagcgtcatcgcaatgcgctgtgcgcctcctgaatccgcgatcagcttgcccagcatcgcaccgagtccaaagatgagcgcgatgtggccaagagttccccctattcctgcttcgatggagctgacaactttatcgaacggcatcccgagtgccagtgccacgccgaacgatacgaccagcagggaaataaatgtgtttaattttaagcccataatcagaaatagtaatgctaagatcccaagtgcaacgatgattaacggcatggtaatgccctccccttcatgtcatgtactatttgtgtgtgattaagcccctctgataatctgcaatttgtgtatattgattttctaataatcttgatagattgatgaaaatcggcattaatgttctgtattccttggctgagtcttcaatcggcgtatgtctgtatgtgctgccgatcatgtcggacacggcgtcgaaagagtcaatttttcctgttgcatacaggcctaaaatgcaggcgccgagacatgagctttcgtagctttctggaacgacaacctctgattcgaagatatcagacatcatttggcgccaaacctctgaccttgcaaaaccccctgtcgcttggatgcgggttaccgggccatccatgcattcagttaacgccaagaacaccgtgtacaggttgtaaatgacgccttccaatgccgcgcgtatcatatgctctttcttatgcgacatggtcaggccgaaaaatgagccgcgtacatccggattccacaacggagcgcgttctccggcgagatatgggtggaacagcagaccgtcagaaccgggtctgacgcgttgggcaattttcgtcagcacgtcatatggatcaatgcccagccgtgtcgctgtttcgatttcggaggaggcaaactcgtctctgatccagcgaaggacgatgcccccattgttcacaggtcccccaataacccaatgcttgtccgtcaaggcatagcaaaaaattctccctttttcatcggtttgcggcttgtcaataatcgtccggatggcaccgcttgtaccgatggtgacggcgatttctccctttttaatggcgttgacgccgaggttggacagcacgccgtcgctggccccgatgacaaaaggcgtttccggatcgattcccatttggatcgctatttccgggctgcagtgctgaaagatctcggttgtcggcacgagtttggataagtgatccggcgtgatgcctgcgatgcgcagtgcctcttcgtcccaagccaagcttttcaggttcatcatgcctgtcgctgatgccaatgagtaatcgatgacatactcattgaacagctgtttaaaaatgtattctttgatgccgatatatttttttgccttggaagcgatttctttcctttcattcgtgatccaggcaattttacttaacggtgccatcggatgaatcggtgttcccgtacgtttgtacacgtcatgtccgttcaattcctctttgatcttatgcgcccagccttcacttcggttgtcggcccatgtgatgcatggcgtcagcggcttgtcattttcgtcgattgcaatgacgctgtgcatggcgctgctgaacgaaatgaaagagatctgtttttcgggatgctgttttgtaattctcgctgttgtatggatgactgcctgaaatatctcttccgggttttgttcagctgttgagatgtccggtgtatagagggggtagccgatgctttctttctgtaccacatccccgttttcactgaacagcacagcttttgtgcttgtcgtgccgatatcgattcctaacatataactagtcattgctgtattcagctccttttgccagcatttgttgtgagagccataggtcttctaccttatcctgcacatcatcaaagttttggtgaagagactgaatcatcagcgccctatcctttgttttgatggcttgaatataaagctcgtggttatctaaaatccttgtgaagtcttcatacttttcctttaaccgtacccgcatcgataaaagaataaagctttccatgacgggttttagattgttccagatcatctgaatgtatgaatgatcaatcgctcggataatggtttcatggaacagcacatcttgaaatgaaaattcgtcagcgtcctcatatttgattgagactttcatcatttcaagaattttgctgagatccttaactaaaggctcaatgtctattttgacaagccgttcaaagacaaatgtttctaatagtaaccgcacatcataaatttccgcgattttcttctcagttaaaccaattacgaccgctcccattcgttctaagcggatgattttttcggatgcgagaatttttagcgcttcgcgaaccggcgaacggcttactgaaaactcggcggcgattgtattttctgataaaatggtaccgctttcaatcaggcctgaaacgatccgcattctcagctcgtatgcgacacgaactccggttgacgcttttgagagccattttgcgggatacaacaggtctttggagtctagcatacactcaccttcctcactcaagaagtatacttgtatacaagtatgataacgtgaatatttcttttatgcaaacactttcatttctaatttttaataaaatttttcccaatcattatggtatttatttctaaatggaatatggtacattggagataactagcataagtgaatcatgttttgaaagaggcgatttggatgaaaatcatcattgcacctgattcttttaaggaaagcttatcagctctggaggccgcagacgcgatagaaagaggtttcaagtcggtctttccgggtgctgattacagaaaattgccggtggcggatggcggcgagggaaccgttcaatctctggtcgatgcgaccaacggaaggatcatagagcaagttgtcacagggccgctgggggaaccggtgagagctttctttggcatgatgggagatgggagaacagctgtgattgaaatggctgctgcttcagggctgcatctggtgcctgtagataagcaaaatccgctcatcactacaacaaggggaacgggagaattaatcggggcagctcttgatgcaggagcggagcgtttgatcatcggaatcggcggaagcgccacgaacgacgggggagccgggatgattcaggcattgggcggaaggcttcttgataactcaggcagcgagattggcccggggggcggcgcgttatctcagcttgcatcaatagatgtgagcgggcttgattccagattgcggaatgtcaaactggaagttgcctgtgacgtggacaatccgttaacaggaccaaagggtgctacggctgttttcggaccgcaaaaaggcgcgacggccgacatgctggatgtactagaacagaacgtaagccatttcgctgatatggcagaaaaagagctcggatcaaccttccgagatacagagggtgccggtgcagcgggcggtcttggatggagcctgctgacttatcttcaggctgacctgaaaagaggcattgatattgtccttgaagcggttgattttgaaagtatcgttcaggatgcagatcttgtgattaccggcgagggacggatcgacagccaaacggttcatggaaaaacgccgatcggcgtagccaaggcggctaaatcatacgatgtgcctgtcatcggtattgcgggatcagtatcacgtgacagtgatgccgtctatcaacacggaatcgatgcgcttttcagcatcgtccccggagccgtgccgctagaagatgcgtttgaacatgccgcggaatatatggaaagaacggcgcgggacattgcagcgtctatcaaattggcgaaaacgatgtttctgatatagccgatgcacatgccaatgcatagccatccttctttttgggtagagacagttaacacacaatgaggaattcatcccagaaggaggacgcagatatgactgtacaagaaatcaaaggcaaaaaactagtaaaaggcattgcgccaaatgtggagccggaagctctgttaaatgataaacgaaaagtatttttgtttggttcccctagttacacaaatattggcgaccaagcgattgcgtatgcggaagagaaatttgttaaaaatcattttccgtattatgaatacattgagattatggattatgcgacggatgagggcattgaactggtgaaggagatcattcgtgaagacgatattgtctgctttacaggcggagggaacttaggaaacctttatctcgatattgaggaagacagaagaaaggtcttttcggcgtttaaagactacaaatcaatttctctgccacaatccgtttattttgaggatacagaggaaggacagaaggaaaagaaaaaaacacaggatgcgtaccatcaaaatacaaatttaacgattgctgcgcgtgagacgcaaacactggatgttgtgaaagagaccttcaactccaatgtgatctttacaccggacatggtgctttccttggatattgtgcctcgagagctcgagcgggacggcgttctctttattttaagagcggataaggagaaagtgactgacgaagattttatttcacagatgaagcaatgggcagaaaaaacaacttacacagagcgtaccgatacggtgctggatacggtagacaccatcgattacgctgatcgtgaaaagcattttatggagatgctggaccgcatcggctccagtaaattggtgattaccgaccgccttcacgcgatgattttctcgattatcaccaaaacaccttgccttgtctttggaaacagctatggcaaagccaaacattcatatcgggattggcttgaaagcttaaacttcattgaatatacggataagaatgatgttgaggagctggagcgtatgattgaccgcctgcttcaagcagaaccgaatgacgttgatttatctaaggactttcagccgctgattgatttttttgcttcttaaacgaaaaagactgccctcccccggggcagtctttctttgttaaatatgaaacagccagacgacgagcgggccgaagaatgagccgagcaccgcacaaagcgtcatggagacggaactcatggatacggccaattccccatattccaatgctttggaggtgcccagtgcatgggaggcgctgcctaatgcaatgccttgtccaagggagctgcgtatgcgaagccattttaggaaaagcggcccgaggatgacgcctgaaaagcccgcaatcatgacaaatacgactgtcatggaagggacgccgccaagaccggcggcgatctgaatagcgacaggggttgtgatcgactttggcagaatggataataagagatcatgatcaatcccgaatgcttctgcgaagatcagcccgctgatcattcccatgcataatccgaccaggacgccgcctagaattggaacacaatgtttgacaataatatgccattgtttataaagcggataggccagtgccacgacagccggcccaagcaaagaattgatccatttccccccgatcatatagccttcataggaaacatggaacatcatcaaaaccgctacaatcaaaatggtcgttgtcagaacggggatcagaaatggaagcgggaatcgcttatagagtttgaccatcgctaaataagcggcaactgttaaaagaattataatgatcgcgatacatgcttgctgcatttctctttctcctcccgtttttttgcttttttctctaatagctggctggcgaatccagccgcaatgatcgtgacgatggtgctcagaacgactgtaatcagcagcatcaggccattgaatgaaatgagagacggatagtttatcactcctgtcattgccgggatgaacaacaatggaaggaaggataataaaaaccctgctccgtcttcaatgatggagacgggaacaatacggaggcccaagcagatcagaagcaataccaatccaacgatgcttcctgacacgggtaaatgaaacagatgctgaatggcttccccgatcataaaaaatacatataatatcaacacttgcaagataattcgtatgactttcacatcaagtgctgctctccaatcagaacagcttcctcctttctggtgcttgcttctaggatggttctgaggaatcgctttactttctttttatatgattgtactatacaagtataatgattgatttattcatataacgacttgtatttattcagttaatgtacatttgtattatacaagtatatatgatgttgtcaatgccggagattggaatagggagcgagagcgattgcaaaatcaaaatccagttgaattaattgaatatgagctgacgacttttatcaggagagctgtttatctggatcaatcagagaaaagaacagggaatttggagagatcttcgtacttattactgagacaattggatgagtttgggcctgctcgtgttaaggaattggctgaatcgtttaagcttgatatttctactctttcaagacaagcagctgcattagaggcaaaggagctcatctatcgtttctcagacccgtctgatgggagagtcagcctgtttaccattacaaaactcggcaaacaactattaaaagccgatcagcaaaagcgccttgaacgttatgaacagatgctgaaagaatggtcaacacaggaaaaagagatgtttggcgagctgctgcagcgtatgaacaaggcttttatcgattaactgctgaaaaacccatggttcgctggaacagcatgggtttttcttatggtcagagattacctgcatcgtttggcggcagcccaagccactagtccggcaacaacagccgccgatacaattgggcgcttcgtcgcatttgtgtagtagcttcttgacctcatccatcctttatttgtgcctctgtcatgcataccgcagcccgcatcataaagagcgctttcttctcgcggtttggacggtctttcggcatgctggctgtgatacatgattttttccatcagtctgtcggtcagacgagggaaaagcgcgcccagcatggcgatggctttggcctgtgagccgatgtacatgtcgcgcttagggtgttcggcggcaaacaggatcgcttcggcgactgcttccggtggatagatcatggagcggtaatgagccggctgtttgtcgaggtagctgtgcgcatgctcgttataaggtgtgtcaattctgcccgggtggatgagcgttaccgagacgggcgcctgttccttttcgagctccattcggatgctttccgtccagccgtgaagcgcaaatttggcagatgcatatgtggattgaatgaccgttcccctgtctccgaacaggcttcctacattaatgagtgcgcccggcacacctctgccagtgtagtgtttgacagcagctcttgttccgtaaacaggtccccagaaatttgtgtcgaacatgcgcttcatgtcttcaacggtgacgtccatggcatgtccgaaagtcgagacggccgcattgttgacccatgtgtcaaagcggccgaatgtgctgatcgcggtttctgcgatgcggttgacgtcctcttcttttccgacatccgcctttacccatatggcgtcgtgccctttttccttaagttcatcagtgagctcctacagcgcctcttcatttcgcgctgctgccacgacctttgcgcctttttcagctgccattctcgccgtgacaagtccgattccgcttgaagcgccggtaatgacgatcacctgatccttgagttttttcagtttgatcttcgttttcatgccggggttctgttgttcaagctgctctgtattcgtgactgaatgatcgattgtcattgagagatccctcctagacgctgtttttgtacattaccccatccggaagggtcttaccccttttgacaatcacagggttcttttttatattatataagtcgctctaccatacctaggagggaatgttttaatgactagcagaggagattcacgtgaaaaaatccttcacacggcgtcacgtctgttccagctgcaaggatatcacgcgacaggtttgaaccagattgtaaaagaaagcggtgctccaaaaggatcgctttatcacttttttccgaatggcaaagaagaattagcaattgaagcggttacatatacaggtaagatcgttgaacatctgatacagcaaagcatggatgaatcctctgatcctgttgaagcgattcagctttttatcaaaaaaacagccagccaatttgataacacagaaagcattaaaggtattccagtcggtttgctggcgagtgagacagcgttaatcagtgaaccgctgcggacggtttgcatgaaggtgtttaaaagctgggaagcggtttttgccagaaaattaatggaaaacggatttgcagatgaagaagcaaatcagcttggaacgctgattaattcgatgattgagggcggcatcatgctttcgttaacgaataaagacaaaacgcctcttcttctcattgccgaacaaataccagtgctggtgagaaaaaaagggtagcattttgttatcctttctcctacaattatatagaacggtctagacaaatgaatgataatatatagactggtctaaattggaggaaatgataatatgaaaacattatgtacacattcattgcctaaagaaaaaatgccttatttgctccggagcggagaaggcgagcgctatctgttcggcagacaggttgccacggtgatggcgaatgggaggagcacaggtgatttgtttgagatcgtgcttctttccgggggaaaaggagatgcctttccgcttcacgtccacaaggacacacatgaaggaattctcgttttggacgggaaactggaactgacacttgacggtgaacgctatttattaatatcaggtgattatgcgaacattccggcgggaacaccgcacagctaccggatgcagagccacagaacaagactggtatcttacacgatgaaaggaaacgtagcgcacttgtattccgttattgggaatccgtatgatcacgctgaacatccgccgtacgcaatcaaagaagtctcaaacgagcgatttgcagaagcagccgctgtagcggacattgtatttctagatgaagcaaagcctgcatgttcggccaaattagcggaacttacagagctgccagatggagcggttccatacgttcttgaatctggagaaggagatcgtctgttgactggagatcagcttcaccgcattgtggctgcacaaaaaaatacagatggccagtttatcgtcgtatcatctgaaggccctaaaggtgaccgaatcgttgatcactaccatgaatatcatacagaaacattttattgccttgaaggccagatgacgatgtggacagatggccaggaaattcagctgaatccgggagatttcctgcatgtccctgcaaataccgttcactcctatcgccttgattctcactatacaaagatggtgggcgtattggttcctggtttatttgaaccgtttttccggacgttaggcgacccgtatgaaggccacatcttcccatgtgagcctcaggctttgcgctttgatcgcattttgcagaatatcgaagcattagatttaaaggtgatgaaaccataaagatgacaagattgtaaggttttcatgccggcctgacacctaaatcgatgttaccgcgcttcattttttcctacccttaaggtacagaaaaaaggagcgtgatggctatgtcttcattacagccgactttaacaaatgagcggatcggtgtgcttgatgtgctgagaggaatggcgattttcggcatcttatttgtcaatctggcacatttcagttatccggatatgtatttgtctatgcttggaaaagagaattttttcatggataagtggtctgaagctgattttgccgccgcagacatactgaaattcttcattcaaacaaaatgtattttattgttttcctttttatttggatttggcatggttgtcatgatggagagagcagaaaacaaagggaaacggtttgttccgttatatgtgagaaggttaatggcgcttctcttgtttggaacgattcatgcctttttgatatgggacggggatattttaacagaatatgccctgctcggttttgtcctgctcttgtttcgaaaagcaaagccgaaaacactgctgatatgggcggtctctttgtatcttctgttttccattccgttcatgttgacaagttttgatcaatcaaacggacaggaatgggtacaagcggtaacacagcaggcaaaacaagcgattcatgtttatggaagcggcagcctgaaggatattgcagaacagcggatccacgaccgtcttgtttacatgtcttcgaatggcatgcttacgtataatccgctcaactacttctttgcatccattccatatttcagcatgtttttgctgggagctgcggcagcaaaatcacggtatttgcatgaaccggaaaagcatcgcaaaggattaaaacgattatggatggctgggcttgtcatcggcatcggcgcccaggtgctgtacagtgtaacggataaagaaatatgtttgctgattggcgcgcctttcctcatgtttttctatgttacaacggttgtctatctttatcataaaacaagagtgagaacagtgctgcaatcattctccgctgttgggaggatggcatttaccaattatttgatgcagtctattgtgtgtacttggattttttatcattacggcttgggcctgtatggaaaagtgtaccctgctgccggtgtgctcattacaattgctgtttgtgccgttcaaatggtcttcagccacctttggcttcgtgtctttcggatggggccgtttgagtggttgtggagaagcgctacgtatctgtcgtggcagcctattgcaaagaaaacaaaagtctagatgcctattggcgtctagacttttttctattatttatacacgacacgtgttttgcaaatgatgtcatgcaggccttttttctctccaaaggcgatcatgataaacccgatataaaagatgattccagataagatataggcaaagtaacggccaattccctgtccgacagaaacccgttcaccttgttcattgaccactttcaggccaagaatttttttgccaagtgtgccttgcattttagaagctgtgagcagcccgtaatataacacgctgatgacgatcatgatcagcatagtaggcaaaaatgcaagcgtcatgtatttcactaaatactcttcttccgtcatgtaagggtttgttgccacagccccagctacaaacacagaattgataataaatagaataatataactaggaacagatacaataatgccgtcaataaaataagctaaaaaacgaatccaaaatcctgctggtttttccatgtatttttctctctcctctgaattaatctggaatagtatactttgaaaaacatgtacgtgcaatatggtatggtgataaaatcctgatattacagaaaaatgagtcttttatcctttgttttttactatataaatctactagaaagaagcatagcatttgtgtatgtattctggaattttttaaaaatataatgaatataacattcaacttacttataataaaaaaggttaatatttctattaaaggaggagtttgatgtcaaaaaaaaatagcgtggcgatcatgacaaccatttctgcgtttcttttttgcgccgtgattgtggcggcttcactttcgccgctggccggaacgggagcggcggccaatcagtttaattcagctggcatgtggtcagctgtcggtatgatccttgtcttgtatttcattccatttctcgtttatatgctcggagtcgatgcaatgaggtatgtcatggcggtgctttgcggattcgggcttttgattcatttgtcttcggccggttttatcttgatgtttagtttctttagtgaccatctgctttctgaggtgatctttgttttcggagttagtcttgctgcggctgctgtcaatgtcatttggtttgtggttgcatttcggcagggtgctgaaaaaacgtctgtgcatacacttacatagttttctagtttgtgatgtttttgtgaaatagatttgtaaaatggatgaatatgttatgatggtcagtcatttcgtatgaaagcactgatggcttttgggaattagtaaaacaggctggcgaggttaactcggcagcctgttttttgatcaatcaagatatttatttttatagataacctttgtcccgcaaatataatcgtgtaatgccagtttagaggggaaagccgccataatgtaaccgatatacaaaattcctgatggtatgtaagcgaaaaaacggccaaagctgtgccaaaatgaaattcgctcgccatactgattgacaacgatgatgcccatgagttttttgcctagtgttgcttgcatttttgaagaagtcagcaagctataataaagaatgccgaagatatatatgatggcgataacagggatcgttccgaatatcaggatataaaatttatattgaccttctgtcatataggagcttcctgcatcaatgagaggcaggacaattaaggtgttaatttggatcataataaaagcaaaaaaatagataattaaatcatcaatatagaggcaactgcccgaatccaaaatccagctggtttttccatgtataatattctttcctttgaagttttctgggatattatacgttaggggctgcagggtttcaatgagatagactagaggaatttggtctcgtagtaaaaatggtattttatcacttttaatctctttatttaggtgatataaagataaaaaaagaacctgcaagatgatgcagattctcttcattacgattatttagaggcctgaataaatacacccttctcatgagaaaactctttgaatccgtataccccatgataggagccgattccgcttgtgttgacgccgccgaatggcaggttgacgtcactgaaatggacgacgacatcattgatggcggcatttcctgatgtcgtgtgctgaaggacgttgtcaatcaggtcttggtttttgctgaacacataaagtgcaagcggtttatcgcggtcatttacgtaatcgatgacctcgtcgatgtcttcatagttcatcattggcaggatcggtgcgaagatttcctcctgcatgattttcatgtcaggcgtgacgtttttcaaaacggttggcgagatcgagcggtcgctggcatcaaatacgccgccgaacaccacttccgccccttttttgatggcatcgtcgaacagatctttgacgcggttgaagttgcggtcattgacgatctgcgtaaatttgctgcggtctgggttgtgatcatcctccataaatccagcgttgacgactgtttgtaaaatccccgcgaacctgtcctgaacgtcttttttaatgaacaggtaatcaggtgcgatgcaggtttggccggcgtttacgaatttcccgacggcgatctttttcgctgcgtccatcagatcgtattcactgtcgataatcgtcgggctcttgccgccaagctcaagtgtgacagatgccaagtgtttggcagccgctgtcatgacgattttcccgacatttgtgcttccagtgaagaaaatatggtcgaacggctgatcaagtagttcggttgccacctcaacctctccttcaaaaatcgcgacttctttttcatcaaaagcgtctcttatcactttagcggcaatgttgctcgtgttcatcgtgaaatcggatagcttcacaatcacgctgtttccggctgcgagagaagcggcaagcggcgccatcgtcagcataaacggatagttccacgggccgaggatgagtgtgacgcctttaggctcgtacataagaattccgtttgcgtcagggcttaacgatgaaccgacttctttaggcgccatccattgttccaggttattcatattatctctaatcgctttttttgttccttcgatttccgcttttttgacttcatgatatggtttgcggacgtctttgcggatcgcttcgatgatttcttcttcatgggcgatgacggaatctaaaaagcgctgaagcttttctctgcgctgttccgctgttgaagcacgcaaggctttttgctgttttttctgaagctgaaagacacgctggatgtcgtcctttacttgctgttccattgtaaaatccccctcatttgctttcttcttttctcggacctattataaggtggtaccttttctgtaagaaagacaacggtaaaccatctatacgttaccgtacatatatcgaacatttgtctaatgattgggggtgtcttttgtgccggaatctgccgaagctcaagtgaaagaggcgctgctggccttattgaaagaaagagatattcaacacatcacaatgaaagaaatcgctgagaaggccaaagtgagccgcggatcgctctacctttattatgaggataagttttcaatcattgaggatgtgatcgaagatatgaaggaaggactgggcaaagcgctttttgatgccttcagtcatatggataccctccatttgaacaaaaaacggcaaacggtgcatccgacgctgtcctttgttcatgagcatcgatcctttttttctgtgatgatgaacagagggcatttccatcgtttttttaaggatgtgtttcagcaggatgttctgctgactccggtccatgtgaatttgacgccgatcgaacgggaaatttacggacattaccgggccttgtacacgtacgcgattatcctgtattggctgaatgaggatgcggccgcgactccggaagctatcagccaaaaggtatgggagcttgtttctcaaaagagattttattggctgtttggacaagctgtgccaggagagcgagagaaggacaagcaaatcgacaggcgtgtggttcgaacgagagaggcgctccagaaggcatttctggacgtgctggcggagaaaaaagactacgcagccatcacaatttcggatattacccggaaaagcaatatccgccgcgcaaccttttatgatcactatgccaataaggaggaattgctccaaaccatgatacagcgatcatgtgcggagatcattgatcacctgacgattgcctccagcccgaatgaattttccttaaaggaagcggagaaggcgctcgccagtctgctttctgctttgtcaaacatgcccattgtccattttctcaatcgggaatggggtgttccccatgtgatacctgatatgttcaaagcgctggaatcgttttatctgcatcagcaaactgatattcacgcagagaaaaagctttatgcccattatgtatccgcaatgattatcgggttgcttttgtatcggctggatgaaggaaaggtgcatccgcctgaagtgctggcgagggagtttttgcagtttttggatgtgaagaaatataaggttgtattgctttgaaagacgaaaagagaggggcatcccctctcttatttcgtttcttccttccatttctcatcaatcagcatcttcccaggccatgtatatgccatgatgccaccgtctgcggtgatgtcctctcctgtgacgtatgagctgtcgtctgacgcgagaaacagcgccactgtcgccatttccttcggctggccgaggcggccgagcggcgtgatccatttgttggcttcgcggaacttttcacccatttcctgttctgtggtgcctgctaatttgtcaatcagcggggtttcgatcgtacccggtgaaatggaattgacgcggatgccgtttcgtgcgtagtcgattgccattgcctttgtcaggttggtgatgccgccttttgcggcgttgtagccagagcggtcaaggtccgcggcacggcctgacatggaggaggtattgatgatggagcctcctttttcgagcatgagcggaatcagatatttgctgcaaaggaatgtgccgcgcaggtcgacagcgataatgcggtcaaacaggtcaaccggatattcgtgtacctttccgccttcctgatcaacgccggcattattaaacagaatatcaatcgttccgcatgcatccttgatttgatcagcaaatgctttcacagtgttttcatctgacacatcgaggtgaaaggattctgcctgtcctccgttttttctgattgtgtcaactgtttcttccatttgttctttattgatatctccgatgatcacacgcgcgccttcattggcaaaaacctctgccgtcgcttgcccaatgcctgtcgcggcgcctgtgatcactgctgttttgttttcaagtcttcccatgatacgagacctcctttttctatttgtcttcccgctatgtgcagtgataaacatgcgagaaaagaaaggccggcatatgttaagatgaattagaaattgttgggaggtttgtatgtttgaaggtacagcataagaaagagctcaagttttattgcttcattaccattccatctgcatttgttgtgctgactgtcatctcttttttattgcaagagattacgtttccggtgactgcaagcgcatttctgaatgcttcatggcataatctattgtttttgataccgttcggtttgtttttctacccggtgcatatatggatgaagcgggagtttggccgctggaatgacacagaaaaaaagagaggatgatgaagcctctcttttttatgagaatgagtgagaaaaagagtgaaaacaaatccaactaatgttaaatttacatatatatgcatctatcaatctaattgacaattgtcatcttatgtgataaatagatgctgaaaagggtttacataatggtaaaggagcgatcaagagtggcgaaaaaagagtttaaagcagagtctaaacgcttgctggatatgatgattaactccatttatacccaaaaagaaattttcctgcgcgagttaatctccaattcgagtgatgcgattgacaaaatctattacaaagcgcttacggacgatgcgcttacgtttgataaagacagttactacataaaggtcgcagctgacaaagatgcgagaacattaaccatctctgatacggggatcggaatgacaaaggatgagcttgaacagcatcttggaacaattgcaaaaagcggttccctcgcgtttaaaaaggaaaacgagctgaaagacggacatgacattatcgggcagttcggtgtcggtttttacgcggcatttatggttgccgatgtcgtgacagtcatcagtaaagcgcttggcagcgaagaggcttataaatgggagtctgcgggtgcagacggctatacaattgaaccgtgtgaaaaggattctgtcggtacagacattatcctgaaaatcaaagagaacacagaagatgacagctatgacgagtttttagaggaatatcgtttaaaagcgatcatcaagaagtactccgacttcattcgctacccgatcaaaatggatacaaccattaataagccgaaggaaggcagcgaaaatgaatttgaagaggtgcaggaagagcagacagtcaacagcatggtgccgatctggagaaaaaacaaaagcgagctgacagatgaggattatgaaaaattctatgctgaaaagcattacgggtttgataaaccgctcacacacgttcatatcagtgtggatggagccgttcgctacaacgcgattctattcgtccctgaaaacatgccgtttgactactattccaaggaatatgagaaaggcttggagctgtattccaatggcgtgctgatcatgaataagtgcgcagacctgctaccggaccacttcagctttgtgaagggcatggtcgattctgaggatctatcgctgaacatttccagagaaatgctgcagcatgaccgccagctgaagctgatcgcgaaaaacatcagcaagaaaatcaaaagcgagctgcaaagcctgttgaaaaaagaccgcgagaaatacgagacgttctacaagtcgttcggcagacagctgaaattcggcgtgtataatgattttggcgcgaataaggatcaattgaaggatctcctattattctactcttcaaaagagaaaaaactggtcagcttagacgagtatgtttccagaatgccagaggagcaaaaatacatttattacgcgaccggtgattcttacgaccgcattgagaaactgccgcaaacggaaatggtggcggacaaaggctatgaaatcctctactttactgaggacatcgatgagtttgcaattaaaatgctggcttcttatcaggaaaaagaattcaagtccgtatcaagcggagaccttggcatagacacggatgaggatcaaaagcagtccgaggaagaggaaagcaagtataaggatctgtttgaggaaatgaaaaacattctgtcagacaaagtgaaaaacgtcagaatctcaaaacggcttaaatcacatccagtctgccttgctgctgacggcgaagtgacaattgagatggaaaaaatcttaaacgcgatgcctgacagccaaaatgtgaaggcggaaaaagtgctggaaatcaacccaaatcacgaggtattccaaacgctgcaggacgcgtttgaacaagataaagagaagctgagcctgtacacaaaccttctgtacaatcaggcgcttctcatcgaaggcctgccgattcaggaccctgtggaatttacgaacaatatttgcaaggtcatggtgtaaacagaaaaaggaatcgtcccataaggagacgattcctttttttataatgtacgctcattcagcacttggttttgggtgcttttcttctttttaaaccgttttttcaggcttgcttcaatttcctccaagcttttccctttggtttccggtaccatgtagaacgcgaagaaaaatgagagaagacaaatgactgagaaaaccataaagacccatgcgatgcccatcgcgcttagcatcagcgggaagacaagcgacacgatcaggttagctgccgataacaccaaagtcgtgaaccctgtcgcggctccgcgtgctttggacgggaagagctcaggcatgagcacccacactaccggaccccatgtcgcctggtaaaagacgatatagacaccgagaaagactactgtcatccacgctgttgatgcggaaagccccagtgtcaggagcacgcctgataaagcagcaaggctcagtgtgatgccgacacttccccagatcagaagttttttgcggccgacacggtcaattaagatcatggcagtgatacacatgatgacgttgaggatgccgatccccattgtgccgagcgccgaagctgatgtgccaagaccggccttcgtaaaaatggttggcgcgtagtagatgaccgtgttaatgccgactgcctgctggaaaatggcaaggccgacgccaatcagaagcatagggcgaatccacttggctttcagcacgccaagtgtcgtttcttttttctccgcttccccttgcttcatctctgccaattccatttcgatgtctttggggtcatgagtgatgttcatgatgcgtctcgcttcttcttcgcggccgcgcttcacgagccatcttggcgattccggcatgaaggcgatgccgattaatagaagcacggcaggcactgcagccagaccgaccatccagcgccacgcttcaaacggtgtgaacaggtagttaacgatataggcgagcaaaatcccggtgacaatcattaagttgttcattgtgccgagtgtcccgcgaattttcgtcggtgccatttcggaaagatacacgggcacaagtgccgttgaaccgccgacggccaacccgagtatcaccctagatgcaatcagcatgccgattgtttgagaaaatgcgcaagcgagcgcaccgataataaaaatgatggaaaggacaaatacaacctttctcctgccccagcggtctgagcatgtgccgctcaaggcagaaccgaaaatcgcgccaaggagcagcatgctgacaaccaatccttctgtcaatgtcgttaaaggaatatcgttattgataaacaggagtgctccggagataacacctgtatcgtaaccatatagcagtccccctaaagcgccgaaaaagtagatcatatatttccttgtgtctttcttcacaaatgtctcctcctcagttgttgagccaatgagtatctaaaatatgtaacaaagttaatagattagtacccatttcctatctcatttgaaacatttgttttgaaaaaacggaaacattaaagcttaaagagatgatcacagatccgctgagtttaggaaaaacgaaataacttcgagatatgctcagagaaaccattaaaaaaccttacccgcgcggagtaaggttttgattaagacatttttattcttctgcttcgttgacgaaaaccaaggcggagaagccttttttcttatcaaattgcaattcaacgacggtaacgtccggattgaagttgtggtattcctctaagaactgaataatgccttctgaaatgtcatctgccataagctgcttgtggtgcaggccaaatgtggcttcagcgaagaaccctgtacgcttgttgtaagatagctcctttacttcaacgtcttcagggtagatatcttcttcattggaaatatacacgcaaattccgtctacaatttcttgctcatttaatattaatctcattgcctaaaatctccttctgtacgtcttcggtgctttaaatgcgcgaatcaatgcgatgacaatgattaaaataatgatcaaagcgatgatatcaacgatccaggcaatgggtgaagcgccataagaaacatagcctgggcctccgactggatgataggtgtaaccccatgggtgcatcatgctgatcatgaacatacccattgtaaatccgctataatatccaaaccatcctgatggcgcgaaacctgcgtgatagtaatgattgactgaaacataacgtccgccaacataagctttagacgtttttccgctgtatgtctttccggttacttttgatgtagcgccggaaaaggtgcctgacgattttttagagcttgatgagcttgccttttccgaaggcttctttttaagcgaaatcgatgatgatgaatcgtcaggcgtcttggattttttgctagaagagcttgatcctgagctgtagcttgatttcgggcttgatttatagcttccgctgtatgacgagcttgaacttcggctgctgtaactagatgatgagcggccgctaaagctttttgcatgagaaatcgttgatggcagcagtacacctaaagcaacggttactgcaactaaggcttttacatatttaagtttcattctgtttcctccataggccgccgaaacggcccgttaatctgagctgcgaatcaaagaagctggatcagcttttttgcttgttatgagtctatatttctaggtgagattaacattgcatgcttttactttttcatcactttctttctgagataaactacctttattttatcggatgtatggctctttttgtaagattttgcttctagaaatttattgcacaagaaaacagccttccccaatggagaaggctgttttcttcttatgcgaacagcttatcaataaacgaaatatcttcttgagaaagcgtcacgtcggctgttttgatgttatcaatcagctgatcggcacgttttgctccagggattaaaatatcaatttccggtcttgctaaataccaggccaatacgatgtgagggatatccacgttgtgtttttcggcaatcggcgcaagcttgttgacctttctgatattttctttgaaacgctcgcccttgaagtgttcctgttcgtttcgcaggtcgccttctgggaacgttgtatcttctgtatactttcctgccaataaacctgatacgagcgggaagtaagggataaatgaaatgttatgctccttcgtatacgggaagaatgttttttccgcttcacggtttaacaggttgtattcgccttgcaatacatctaccaaaccgtctttgtttgcttctttcaattgctctaaagagaagttggatacaccgatggagcggatttttccggctttcttcatctcattcaatgcgttaacggcttcatccttcggcgtatgttcgtcagggaagtgaatgtagaacaaatcaatataatcggtattcaagcgctttaggctttcatcaactgatttttttagaaattctggtgaattatcaaagacaaagtcattgccttgttttctgtgagcggcttttgtggcgatgacaacatcttcacggttgaattcacgcagcacttcaccaattaattcttcggaacggccgatcccgtaaatataagcggtgtctaacatggtcacgccattatgaatcgcctcgcgcaccaattcttttccggtttcttcattcaggttcgggtagaggttatgtcctccgacagcatttgttcctaatccgatagggaatacctgcaagtctgattttccgagcttcgcttttttcatgatctgcctcctagaataaaatggatgatagactctcaacactattgtaaacgttaggccagatgaatgccgatttgatgctcattgcagtactgcgtgtactcgtcgtctaatggctgagaggtcacaatgcaatgcagcctgtcaaacggcgcatacgtcagaagcgttgattttccgaatttagaatggtcagccaatagatacacttcttttgctttttctgaaatcctctttttaatttcatactccagcagatccgaattggtcaatccgtgtgtcagcgtcgttccggtagcggacataaaggctttgttgatattgtacttatcaagcatagccgggtcgtccatgccgacaaaggagcgggtttttctcttatagttgtttccgataatgattaagttgatattcttcaaagctgacgccgcattgataatgtctaaactgttggttaagatggtgacatttttggctggatcaagcgtatcaagaatagactttgtcgtcgttcctgaatcaatgaagaccaaatcgtgatcttcaataaatcgggaagcataatgggcgatttttgttttttcatcctggtgctgaatggtgcgattttcaaaaggaactaatgcggttttttcaatagatgttacgccgccgtatactttttcaatcgcacccttttctgttagcttgttgatatcacgtctgactgtgtttttggagacattgaacacctggcacagctcatctaaggaaacagtgccatgcgataaaatgtactcctccatttcctgaatccgcatcagtttcatattaaaaactccttcttgaatctttacgtaacataaatatataataaaaaccaaaagttaatcaatagttgcttaaaaaatgataacatcggtgtatatcttttgcaagattcgacgggcttctcttacctctattacttgattaaaagattaatataataaaaataatgaaaaaatttagtgtttatgattgacttatgggtattatgcgattagaatataaccaagaaataaccaaaaagtaacctgttgtgcatgaaatggttgcttgtatgtaaatatgcatccgccatttatttttttgttttttttttgaaagcgtttaattcttggcttactgaaaagtggatattgatatgaatctatcctgaaccatccatacaagtgtatgtgtttactaatgaaggaggcaataagaatggcagaaatcagaaaattaaaaaactacatcaacggtgaatgggttgaaagcaaaacagatcaatatgaagatgtcgtcaatccggcgacgaaagaagtactatgccaagtgccgatttctacaaaagaggatattgattacgcagcgcaaacggcggctgaagcatttaaaacatggtcaaaggtggcggttcctcgccgtgccagaattctatttaacttccagcagctgctgtcccagcatagagaagaacttgctcatctaattaccattgaaaacggaaaaaacacgaaagaagctttaggtgaagtgggacgcgggattgaaaacgtagagttcgccgctggagcaccttccctgatgatgggtgactcacttgcttccatcgcaacggacgttgaagcggcgaactaccgttacccaatcggagttgtcggtggaatcgcgccattcaacttcccgatgatggttccttgctggatgttcccgatggcgatcgcgctcggcaacacatttattttaaagccatctgagcggactccgctgttaacagagaaattggttgagctttttgaaaaagcgggccttccgaaaggggtattcaacgtcgtatacggtgcgcatgacgttgtgaacggcatccttgagcatcccgaaattaaagcaatttcatttgtaggctccaagccagtcggcgaatacgtctacaaaaaaggaagcgaaaacttaaaacgcgttcaatctctgactggcgcgaaaaaccatacgattgtcttgaacgatgcgaatcttgaagacacggtcacaaacatcgtcggagctgccttcggttctgccggtgaacgctgcatggcttgtgcggttgtgacggttgaagaaggaatcgccgatgaatttatggcgaagctgcaggaaaaagtggcggacattaaaatcggtaacggccttgatgacggcgtgttcttaggaccggtgattcgcgaagacaacaagaagcgcacgctaagctatatcgaaaaaggtcttgaagaaggtgccagactcgtatgtgacggacgtgaaaatgtgtctgacgacggctactttgtcggcccgacgatctttgacaatgtcacaacagagatgacaatctggaaagatgaaattttcgctccggtcttatctgtcatccgtgtgaaaaacctgaaagaggcgattgaaatcgccaataagtctgagtttgcgaacggcgcctgcttgttcacatccaactcaaacgcaatccgctacttccgtgaaaacattgatgcgggaatgctaggcatcaaccttggtgtgccggctccaatggcgttcttcccattctcaggctggaaatcttcattctttggaacgctgcatgcgaacggaaaagacagcgtcgacttctatacacgtaaaaaagtggtgacggcaagatatccggcacctgatttcaactaaacgacgaacagccgaacggcgtccatgtgcgctgttcggactcattctgccaatagaaagaggagggcttctctatgagttatttgttgcgtaagccgcagtcgcatgaagtgtctaatggggtcaaactcgtgcacgaagtaacgacatccaactctgatcttacttatgtagagtttaaagtgttagatcttgcaccaggttcaagctatacagaagaattgaaaaaacaagaaatctgcattgtagcggtaacgggaaaaattacagtgacagatcatgaggcaacttttgagaatatcggcacgcgtgaaagcgtatttgaacgaaaaccgacagacagcgtctatatttcaaatgatcgtgcatttgagatcacagcggtcagcgacgcaagagttgcgctttgctattctccatcggaaaagcagcttccgacaaagctgatcaaagcggaagacaacggaattgagcatcgcgggcaattttcaaacaaacgtactgttcataacattcttccggattcagacccttcagctaacagtctattagtagttgaagtctatacagacagcggcaactggtccagctacccgcctcacaaacatgatcaagacaacttgccggaagaatctttcttagaagaaacgtactaccatgagttagacccgggacagggctttgtgtttcagcgcgtatacacagatgaccgttctattgacgagacaatgactgtggaaaatgaaaacgttgtcatcgttcctgcggggtaccacccggtaggcgttccggacggatacacatcctactatttaaatgtcatggcagggccgacgcgaaaatggaagtttcataacgacccggcgcatgagtggattttagaacgctaacaagtgaggagtggctgtttacgatgaagtatacattcaatgaagagaaggcttttgatattgttgccatcggccgggcatgtattgacctgaacgcagtcgaatacaaccgcccaatggaagagacgatgacattttccaaatacgttggcggttcacctgcgaatatcgcgatcggcagcgcgaagcttggcttaaaagcgggcttcatcggcaaaattccggatgaccagcatggaagattcatagagtcctatatgagaaagaccggcgttgatacaacacagatggttgttgatcaagatggacacaaagcaggccttgcatttacagaaatcctcagccctgaagaatgcagcattttaatgtatcgcgatgatgtggcggatctttatcttgagccttcagaggtaagcgaggactatatcgcaagtgcgaaaatgctgcttgtttccgggacagcgctcgccaaaagcccgtcacgggaagcggtgctaaaagctgttcaatacgcgaagaagcatcaggttaaagtggtgttcgaactggattaccgcccgtatacgtggcagtcatcagacgaaacagccgtttattattctttggttgccgagcagtccgatatcgtcatcggcacacgtgatgaatttgatgtgatggaaaaccgcacaggcggaagcaatgaagaatccgttaatcatttatttggccattcagccgacctcgttgtcatcaaacacggcgtcgaaggctcttatgcatacagcaaatccggcgaggtattccgcgctcaagcgtacaagacaaaagtgctgaaaacctttggagccggtgactcctatgcgtcagcctttatctatggccttgtcagcggaaaagacattgaaacggcattgaaatacggcagtgcttcagcttccattgtggtgagcaagcacagttcgtcagaagcgatgccgactgcggaagaaatcgtacagcttattgaagcacagtcataattgaaaaagatcgagtaaaggtgggatcgtttgtgggtaagaaaattcgcttaacaacagcacaggcgctgattaaattcttaaaccagcagtacatccatgttgatggaaaggaagagccttttgtcgaagggattttcacaattttcggtcatggaaacgtattagggatcgggcaagcgcttgagcaggatgcaggccatttgaaagtctatcaagggaaaaatgaacaaggaatggcgcatgcggccatggcgtacagcaagcaaatgctgagaagaaaaatatatgcagtgtctacatccgtcggaccgggagcggctaacttggtggcggcagccggcactgcattggcaaacaatatcccagttctcttgattccggcagacacatttgcgacaagacagccagaccctgtactgcagcaaatggagcaagaatacagcgcggcgattacgacaaacgatgcattgaaacctgtatcgagatactgggaccgcattacgcgccctgagcagctgatgagcagtttgctgcgcgcgtttgaagtcatgactgatccggcaaaagcaggtccggcaacgatttgtatttctcaggatgttgaaggggaagcatacgattttgatgaaagtttcttcgtcaaacgggttcactatattgatcgcatgcagccgagcgagcgcgagcttcaaggtgcggcggagctgattaaatccagcaaaaaacctgtgatcctcgtcggcggaggtgcaaaatattccggtgcgcgtgatgaattggttgccatttctgaagcctataacattccgttagttgaaacgcaggcaggaaagtctactgttgaggcagattttgcgaacaaccttggcggaatgggcatcacaggtacacttgcggcaaacaaagcggcccgccaagctgatttgattatcggcatcggcacaaggtatacagattttgcgacatcctctaagaccgcttttgattttgataaagcgaagtttttgaacattaacgtcagccgaatgcaggcgtataaacttgatgcattccaagtggtagcggatgcgaaagtgacgcttggcaaactgcatggcttgcttgaaggctatgagagcgagttcggcacaacgattcgggagctgaaggacgaatggctagctgaacgcgagcgtctcagcaaagtgacgtttaagcgggaaggatttgatccggaaatcaaacatcatttttctcaagaggtcctgaatgaatatgctgacgcgttgaatacggagcttccgcaaacaacggcattgctgacaatcaacgagacgattcctgaagacagcgtcatcatctgttcagcaggctcactcccaggagatttgcagcgtttgtggcattctaatgttccgaatacgtatcacctggagtatgggtattcttgcatgggctatgaagtgtctgggacactcggtcttaaactggcccaccctgacagagaagtgtattcaatcgtcggagacggcagcttcctgatgcttcattctgaactgatcacggcgattcagtacaacaagaaaatcaatgtgctgctctttgacaactcaggattcggatgcatcaacaacctgcaaatggatcacggcagcggcagctactattgcgagttccgcacagatgacaaccaaatcctgaatgtcgattacgcgaaagtcgctgagggatacggcgcgaaaacctaccgtgcaaacacagtagaagaattaaaagcggcgttagaggatgcgaagaaacaggatgtatcaacattaattgaaatgaaggtgctgcctaaaacaatgacggacggctatgacagctggtggcatgtcggggtggcagaggtatctgaacaagaaagcgttcagaaggcatacgaagcaaaagagaaaaagctggaatctgcgaagcagtattagaggggaggcaccatagatgggcaaaaatgaaatcctgtggggaatcgctcccattgggtggcggaatgatgacatgcctgaaattggagcgggaaatacacttcagcatttgttaagtgatatcgttgtcgcacgttttcaaggcacggaggtcgggggctttttccccgaacctgccatcctgaacaaagagctgaagcttcggaacttacgcattgcaggaaaatggttcagcagttttattttgcgtgacggacttggtgaagcggcaaaggcatttaccctgcattgtgagtatttgcagcaagtaaacgcggatgtcgcagttgtctctgaacaaacgtacagcgtgcaaagcttggagaaaaacgtgttcacagagaagccgcactttacggatgatgaatgggagcggctttgcgaagggctgaatcaccttggcgaaattgccgctcagcatggcttgaagcttgtctatcatcatcatctcggcactggtgtccaaacagcggaagaagtggaccgcctgatggcaggaacagaccctgcgcatgtacacctcctctatgatacaggccatgcgtatatttctgacggcgattacatggggatgcttgagaagcatatcggccgcattaagcatgtgcactttaaggatgcccgcctgaatgtcatggaacaatgcaggctcgaaggacaatcgttccggcaatcatttttaaaaggcatgtttacggttcccggtgacggctgcattgactttagagaagtatatcagctgctgttgaagcacagttattccggatggattgtcattgaagctgaacaagaccccgatgttgcaaacccgctggagtatgcattgattgcgagaaactatattgatcagcagttgttggatctggcttaatggggaataaacatatgggcaataccaatggagattcagccttcaataaacggacaatcgcggcagcattggccaactatattgatgccggttcaattgtggcaggctccgccggtttatcattatgggtcagttaccttaagctatccgatacacaaatcgggctgctcggcgcgctgagcgcaaatgcgatttctgccgctgtcggcgcgctacttggcgggtttctggctgataaagtcggacggaaggctgtttataccaatagtatgctggtttatgcactagggatttgtttggttttgttcggggttaatttccccatgttgttaagcggttacatcattatcggtttatcagtaggagctgacataaccgcgtcatggaccattattgcggaaaatgcgccaaagaagaatcgggccaggcattgcggcgtagcacaagtcgcttgggccgcgggcgctgtcgttgtactgctcctctccgtactggccggagacttgggactcttggggaataaaatcgtatttgcccatctgcttgtgattgcgctgattacgtacatcctgagaatcaggcttccggaatcagacgcctggcagtcaaaaaatcagccggaggatgctcaggcagagaagccggctgtactgaataagacatcatattttgatttgctcaagcctatgtatctcaaaagcatattgtttttgatgggtgtgtacttggtttggaacttagccgccggggtcatgggcttctttatgccatacatttatcagcaggtcggcggtgtatctgccaacatggccaatcttttgcaaatggggctgtttatcttcacaggattgggggtcgctttgatcttcatgccctttgccgacaaatatagaaaaaccgtatttggaatcgccgctttcatggcggtgatcgggtggacactgtttctgctgccagttgaaggcctgccgattctgctcctgtttattgtcgtgatcggcatcaataacggagcagggcagcaagcgaactatcagttatgggctagtgaaatctttcctacgcaatatcgtgcttccgcacaaggactgatgtttttccttgtccgtatttcaatagggatttggagtctgtttgtcccaatgattatcaccaatttcggcattggaacgatggctgcaattcttctcggatgtgtgacggccagtatgatcatcgggctgctctttgcgccgaatacgtctggcaagtcgcttgaacaaattcaagaggaactctacgggtctcctcagagccaagtaaagcaaggaacagaaagcaaaatcatgtaaccaacagaaggagtggctgtcaatgagtttacgtattggcgtaattggaactggagcaatcggaaaagaacatattaaccgcatcacgaacaagctgtccggcgcagaaattgtagctgtaacggatgttaatcaagaagctgcacaaaaggtcgttgagcaataccaattaaacgcgacggtttatccgaatgatgacagcttgcttgcagacgaaaatgtagacgctgtcttagtgacaagctgggggcctgcgcatgagtcaagcgtgctgaaagcgattaaagcccagaaatatgtgttctgtgaaaaaccgctcgcgacaacggctgaaggatgcatgcgcatcgtcgaagaagaaatcaaagtgggcaaacgccttgttcaagtcggcttcatgcgccgttatgacagcggttacgtacagctgaaggaagcactcgataaccatgtgattggcgaaccgcttatgattcactgcgcgcaccgcaacccgactgtaggagataactacacaaccgatatggccgtagtcgacactctcgttcatgaaattgatgtactgcactggctcgtcaacgatgactacgattccgttcaagtcatctacccgaaaaaatcgaaaaacgcgctgccgcatttaaaagatccgcaaatcgtcgtaattgaaacaaaaggcggtatcgttatcaatgctgaaatctatgtgaactgtaaatacggctatgacattcaatgtgaaatcgtcggagaagacggcatcatcaagcttcctgaaccatcaagcatcagcttgagaaaagaaggcagattcagcactgatattttgatggattggcagagacgctttgtcgctgcgtacgatgtggaaatccaagactttattgattcgattcaaaagaaaggcgaggtcagcggaccgacggcatgggacggctatattgctgctgttacgactgacgcgtgtgtaaaagcccaagaatctggacaaaaagaaaaggttgaattgaaggaaaaaccggaattctatcaatcttttacaacagttcaaaactaaaaaacagaggagtgaaaatatgaagttagcattggatccatccatgtatcgtgatgatttaactttagaggaaacggtctataaaacggcggagcttggctatgaatatatcgaattgtctccgcgtgaggatttttgcccgttttataaatatccgaaagtcgattcagcaaagatcaaacaattaaagcgccttttaagagatacaggtgttaagctttcatcgcttcttcctctttaccactgggcgggacccgatgaagaccgccgccaggcagcagtgcgcaattggaaacgggcaatcgaaattgccgttgaacttgaagtggatttgatgaacagcgaattcagcggttcaaaatatgatcctttaacaagtgaagaaaaatttatcaaatccatggatgagcttctgccagtctttgaaaaagaaggcatgaaactcaatcttcaagcccatccatacgattttatcgaaacgcacaaaggtgcgatggatatgatccgcgcgcttgacaaggattggatcaatcttgtctactcgactgcgcatacgttcttctatgatgacggcaaaggcgacatcgagaccatgtttgacgaagccggcgaccgcctcacacatgttttatttgcagatacctataatcataaagcggctcatggccttcgctacatcgtcaatccgcctgacgcgaaagtaacggttcaccagcatttggacattggccaaggcgaggttgattttgatacgattttcagaaaactgagagagatgaagttcgacggaattgcgacgaatgccgtatttgcttgggtcgatgaaagagcggatgaatcaagccgatttatgcttaagaaaatgaaagaagaattaggtctggcataagctgagcatggagttcggcgggatatggcgacagccttcctgccgaactcccttcatatctaaaacgcagatgggggagtctggcatgaaactttgttttaatgaagcgacaacattggaaaactcaaaccttaaactggatttagaactatgcgaaaagcacggctatgattatattgaaatccgcacaatggataagctgccggagtacttaaaagatcattcattggatgaccttgcggaatattttcaaacccaccacatcaaaccgcttgccttaaacgcactcgttttcttcaacaaccgtgatgaaaagggccacaacgagatcatcactgaatttaaaggcatgatggaaacatgcaaaaccctcggtgtgaaatatgtggtggccgttccgcttgtgacagagcagaagattgtaaaagaagagatcaaaaagagcagtgtagaggtgctgactgagctgtcagatatcgcggagccgtacggcgtaaaaatcgcgcttgaatttgtcggccatccgcaatgtacggtcaatacgtttgaacaggcgtatgagatcgtaaacacagttaaccgtgacaatgtcgggcttgtccttgacagttttcacttccatgcaatgggttcaaatattgagagcttaaagcaggcggacggaaagaaaatcttcatctatcatattgatgatacagaagatttcccaatcggctttttaacagatgaggatcgtgtatggccgggacaaggggcaattgacttagatgcccacttatctgcactgaaggaaattggcttctctgatgttgtatcggttgagctcttccggcctgaatactataagctgactgctgaggaagccattcaaacagcgaaaaaaacaacagtggacgtcgtatcaaaatacttcaacatgtaatggataaaggaggggtggacatggcttttgtatcgatgaaagagcttcttgaagatgcaaagcgggagcaatatgcaattggccagtttaatatcaacggcctgcaatggacgaaggcgattttgcaggcggcgcaaaaggagcaatcaccggtcatcgccgcggcttccgatcgcctagtcgactatttaggcggatttaaaacgattgctgccatggccggcgcgttaatggaggacatggcgattaccgttcccgtggtgcttcatctcgatcacggaagcagtgcggaacgctgcagacaggccattgatgccggattcagctcagtgatgattgacggctcccatcagccgattgacgagaatatcgcaatgacaaaagaagtcaccgattatgccgcaaaatacggcgtatcagtagaagccgaagtcggcacggtcggcggaatggaagacggacttgtcggcggggtctgctatgccgatatcacggaatgtgagcggatcgtcaaagaaaccaatattgacgcgctggccgccgccctcggctctgtacacggcaaatatcagggtgagccgaatctcggatttaaggaaatggaggctatctcccgcatgactgatattcccctcgttcttcacggggcatccgggattccgcaggatcagatcaaaaaagccatcacgctcggccacgcgaagatcaatatcaatacggaatgtatggtagcgtggacagacgaaacacgccgcatgtttcaggaaaacagtgatctgtacgaaccgcgcggctatatgacacccggcattgaagccgtggaagagacagtgcgaagcaaaatgagagagttcggatcagccggtaaagcagctaagcagcaggtcggctaaagagaccagaaaccgccgagatggcggtttttttgtgcggtgttgcgtccatacgcccaaaacgattatgatgatggcagcagtgtaagaaacgggagtggttcaggttgaataaaattatgattgtggaagacagtgaagacattcgcggactattgcagaattaccttgaaaaatacggatatcaaacagtggtcgccgcggattttacagctgttcttgatgcctttttgcgggaaaagcccgatgtggtgctgcttgatatcaatttgccggcatatgacggatattattggtgccggcaaatccgccagcactccacaagcccgatcatctttatttctgccagaagcggggaaatggatcaggtgatggcgattgaaaatgggggagacgattatatcgaaaaaccgttttcttatgatattgtgctggcgaaaatcaaaagccagatccggagggcgtacggggagtacgccgcaaagcagggagagaaagtggttgaatatgccggcgttcagctctttgtggaacggtttgaactgcgttttcaggatgaaaaaagcgagctttctaaaaaagaaagcaagcttttggaagtgctgcttgagcggggagaaaaggtgacgagtcgggaccgtctcatggaaaagacgtgggacaccgacatattcatcgatgataatacacttaacgtgtatatcacgcggctcagaaaaaaactgcgggagctgaatgcgcctgtttctattgaagcggtgcggggcgaaggctaccagctgagggcgcagtcatgaagctgtttctccggtctcatgcagtgctgattctgctttttttccttcaagggctgtttgtcttcttttattactggtttgcgggtctgcattctttttctcacttgttttacatattgggcgtgcagcttcttattttggcgggttatcttgcctatcgctggtacaaagaccgcggcgtgtatcattggctcagctcggggcaggaagggacggatatcccgtatctcggttcttcagtgttctgttcagagctgtatgaaaagcagatggagctgatccggctgcagcaccagaagctccatgagaccgaagccaagcttgacgcgcgggtgacgtatatgaatcaatgggtgcaccaagtgaagacgccgctgtcggtcattaatttaatcattcaagaagaggatgagcccgtttttgaacaaatcaaaaaagaagtccggcagattgaattcgggctggagacgcttctttattcttcaaggctcgacctgtttgaacgggattttaaaatcgaagcggtttccctgtccaagcttctccaatcagtcattcaaagctataaacgattttttattcaatatcgcgtttatccgaaaatgaacgtttgcgatgatcatcagatttacaccgatgccaaatggctcaaatttgcgattggccaagtggtcacaaatgcggtcaagtattcagcgggcaagagtgacagacttgagctgaatgtctttcgcgatgaagacaggacggtgcttgaagtcaaagattacggtgtcgggattccctcacaagacatcaagcgggtgtttgacccttattacacgggtgaaaacgggcggcgtttccaagaatctacgggaatcggcctccatctcgtcaaagaaattacagataagctcaatcatacggtggacatcagctcgtctcccggtgaagggacatcagttcgattttcatttcttacaaaaatgtaaggctgcgttaagaaaacaacatagcccgctttgtttccccttgataacatggatttatgtcaaggggatttttatgttgaacgtcccggcactacatgaaagcagcccatatcaacaagaataaaaccataaggaggattttcatggcgaatatgcttgaagtcaaacatataaataaaacctataaaggacaagtgtcctatcaagccttaaagcaaatttcattttcaatagaagaaggcgagttcacggcggtgatggggccgtccgggtccggaaaaacaacgcttttgaatatcatttcaacgattgaccgtccggattcaggcgatatcctgattaacggagaaaacccgcatcgcctgaagcggacaaagctcgctcatttccgccgcaagcagctcggatttgtgtttcaggatttcaaccttctggacacgctgacaatcggtgaaaatatcatgctgccgttaacgcttgaaaaagaagcgccgtctgtcatggaagaaaaactgcacggcatcgcggcaaagctcggtatcgaaaacctgcttaacaagcggacgtttgaagtatccggaggccagcgccagcgggccgccatcgcaagagcggtcattcataagccgtcactcattctggccgatgaaccaactggaaaccttgattccaaagcgacaaaagacgtcatggaaacgttgcagagcctgaatcgggatgatcatgtcacggctttgatggtgacccacgatccggtttcggcaagctactgccgccgcgtcatctttataaaagacggcgaattgtttaatgagatttaccgcggggaaaaccgccaagtcttttatgaacaaattcttgatgtgctgtctatgctggggggaaacgcaaatgacctttcttcagttcgcttataaaaacgtcacgagaaacaaaagggcctatcttgcattctttttaagcagcgccttttccgttttgattttctttacctttgcgatgttcctgtttcatccggcattaaaggaaggctacctgaataacatcgccaaaaaaggcttaaccgctgcggaatggatgatctttgttttttctttcttatttgttctgtattcggttaacgcatttttgaaatcgagaaataaagaattcggcattctgctcatgcagggcatcacgccgggtcagctgagaaagctcattacggcggaaaatatgatcatcggcgtcatgtcaattgcagccggcattatcggaggattcattttttcaaagacgttctttacggtcggcgcttatattttagaaatggacgcgctgcctttgtatatgccttggaaagcgctcggtattacggcctgcggatttctgctcttatttttctttttatcgcagtttacgatcctttttgtcagatcaaatacggttatcaaattaataaagggcactgacaagattaagccggagcctaagccgtccgtgcttctgtccttattcggcatcgcctgtctttgcggcgggtacggcatggttcttaaaggcaatgtccacggggccgaaccgtttatcattttactgctcaccgtcatcggaacttatttctttttcagccaaagcagcatatggattctgcgcgcactgaagaagtggaaaaccttttatctgcgcgggaaaaacgtcatctgggtttctgaccttgtctatcgtttaaaagacaacgcccgcctgttctttattgtcagcattatttccgcggttgcgtttactgcgacaggcgtgctcgcgatgtacaaatcgaccgtcggggcggaagagtccgcttatgaaatggagtatttatcttacagcaacaatccaaaagaacagactcatttgaaagatattgaccatgaactgaaaacacacggctttacgtataagaaagacaaaatagatgtttcctatgttcgctatcaggaaggagaaactgttccccctgtttacatgatcagtgaatcggatgcggcaaaatacttccatgtcaaagtgaacggcctgaaagaagacgaggctgtctatttcccgggaacgtatgaccgcaatttcaaaaacgaagcgccggatcagctgaagctgctgaaccaaaaaggggagctgtctgatcaaaaactgtcggtaaaagaagtcaaaaaactgctgatctcattgaatgccatcatcgcggtgaatgatcaaacctttgatcagctgaaatcactcggtgataaagcgtcattatacggctacagctatgatcattggaaagacagtcttgagatcagccaatccttgcaaaatgagatttacggcaattatatcgacgtgcattctgactttgcttcaaaagccgggacttactatgatacggtgcagctgccgagcctgagtttatttatcggcctgtttatcgcaattgtattctttgtcgcggcagcaagtttcttatatttcaggctgttcactgatttagatgaagaccgggagcgctaccgttcactggccaaaatcggcctgagtgagcgtgaaatggcacaaagcgtgacaatacaattggcgattcttttcttctttccatttgtcattgccgtcatgcatacactgtttgccttgagaacattggctgtggaaggctattctgatgtcgcggggccgctcagtctcaccatcggagggtttttcatttttcagcttctattcttcctcgcggtgcggtcaagctatttgaaaaaaatgaacaagtaaggggagtgcaaagatgaaaaaagcaatggcaatcctggccgtcttggcggctgctgccgtaatatgcgggcttctcttttttcataacgatgttacagacagatttaatccgtttattcaccagcaagatgtctatgttcagattgatcgagatggcagacatcttagtccgggcggtactgaatatacattagacggatataatgcatccgggaaaaaagaagaagtgacctttttcgccggcaaagagcttcggaagaacgcgtatttgaaggtgaaggcgaaaggaaagtatgtcgagacttgggaagaagtcaagtttgaagatatgccggactccgtacagtcaaaattaaagtgaaccataaaaaacggcacagcgtcatgactgtgccgtttttttattttttattttcttcggcccgtttgatcagcatgtcggtgatgatatccacctgtttgctgacagaaatcgggtcgtacgggtagaacgtgtcaaagtcattgataaacacgcgattatgtttaacagcgtcaaggttcttccaaatagaggaattctccagcttgtcgagtgttttgctttcgcctttcgggttgtaatccgtaatgaacatataatctgcggcatactcaggaataacctcttgagagagctgtttcatctctccttttttgatgacatcttgctcaattttttcaggcgcttttaacccaagtgcattgtatacagcttggccgccgcgtccgccattgtcattgaacacccagaattcgcccttgtctgtgttttcataaatgccgaaggtcgcatctttgtcgatgacgccggcaattttctttttagctgcttccgcttttttgttaaagtcagccataaatgattctgctttgtctttcgctccggcgatatctccgaacatgctgactgtgtcctctacgtttttcgctgtgttataaggtatgacaacagtcggagcgattttctttaatttatcaacattctcttcattcatgacaacaattaagtcaggctgaagctccatcactttttcaacgctgattggatcaccgacatccttcacatttttcagctttgattttaaaaacggattatcaaatgaccatgagcctgagccgaccacattggccccgacagacagcaattcaccggcataaaaatcagtgacgatgcgtttcggatgtgcaggaatgttgacgttcccttttggtgatttgtatgttctcatttctgttttttcggaagcagaatcgcttgagctccctttagaagccgtgccgctgcaagcgctgacaaacatgagaagcagcacaagcatgcccacgagcaatatgttctttttcatcaagaaccctcccactatgtatctcaatagattagtaatgattatcattatcaattaataatatagcaagaaacctgttctccgtctatcactatttttaaaggagaaagtttttcccgtttatgggtgacgcggtatgcctaatcgattattataggtaaataggaggagaaaaatatgggaattacaaaaagaggttccgcttgggaatggctgcatagctggtggatgctgtttattttcatgccttttgccattaccagtttttttgcctttttatttattggcatcaaggttagaaatagaaagtggatcatgtacggcatcatttattttttcatttttgcgtttggttttgttttgcccgatctgcccggtgtttttattgtggtcccgttatgggcggtgaccattattcatggatttaaagtgcgcccgctgtatttgattcagctggatgtctacaaagatcatgtggaggcgcgggcttttgccgaggcaagaagtgaagccgagagcagatttcatgcaccgaaacagtctattcaggatatacatattcgcaaagaacagtaagaaaaaaagctcaacactcgcattgtgttgagctttttatatgttactgctgataggattgctgctgaaatggcgtgttttggccgaatggaagtgtagacacattcgtattcatgacgctggattgccagtaagttcctgttgcatttggttgcacatgttgacaacctgctggcacttttgaatcgccatgtcatgcccgtgcagtgcttgctgaatggtatgtgcagcttgttgttcgtggtttagaatctgctgcagcatttggatgttttgctgttcctgatgaagcatgtggcgatattgctggctgctttgctgtgtttgctgaatgagctgctgagcagtctggcggcattgattcagctgctgcaagccgtgttgtgtattatgcatgaatgatccctccatgtatcgattgacgtgagtcggtattatcatgcaacctgaatgaaaagaaattctgcaaatgaggaactacaattattttcctcagcccctctgtctttgaatgaaaacggtaaagattgtatactgggtacaaaccctttttatgtaaatgttccgttttaacatataagaatggcggaaaacgaaaccctgagatgggagaatcgtattccgctttttttctttgtttcgctcagaaaccgccttcccctgcagtaaatgggatattcagccggttttctactgtacggaggcgctgattgagccggtttaagcggcgtgtatgacgttcaacagcctggcttagctgattgacctgttcggcaatccgtgcaatttcccgattttgacggcggtcttcgtttgtcagacgggttaattctcttgactgctgttcattttgccgttcaagtgctgcgattcttctttccaatgccggctgtctgtccatttggtatggatcgtatacatcctgctgcggataaggattgtactcatagtggctatagtaaggttcctgctgaggcagctgagggctgtaatattgataagggttcattatgatcaatctccttgtgggtgatttccttataacttatgtagtcattggcacagtggcacggcattcgcccaaaaagaggaggaaaggatggtgatccccttgagaaacaaatatggcattttgtttttaattgctgtatgcatcatggtatcgggctgccagcagcaaaaagaagagacgccgttttattacggaacgtgggatgaggggcttgcccccgggccaacggacggcgtgaaatcagcaacagtcacatttaccgaagacgaggttgtggaaacggaagtgatggaaggaagaggagaggtacagctgccttttatggcatacaaggtgatttcccaaagcactgacgggtctatcgagattcagtacctcggcccctattatccgctcaaaagcacgctgaaaagaggagaaaacgggacattgatatgggagcaaaatggccagacaaaaacgatgacaagaatcgaatcaaagaacggcagggaggagaaagatgagaaatcaaaaagctgaaagactggtggcagcggggcttgttttacatatcattcaatggatatttatattatgggcttttctcaaagtcaaacatttatttagtgactatacgatctataaccctaatgtcatcagcggctccatgcagtccttatcgtttatacaaatgatgcgcgctatgatgtactcaggggcaatcgtgaattatgtgttgttttttgcccttgtattgctgatttatggcatagtgcttcatgccatcctgatcgttctggaaatggcggcttacgtcatgatcagacggaatccatcatcttcatgggggttctttttcatcgcggcgggtgtgaagcttgccatcttgaatatcaccggcattccttttctagctgccggctttctgctgatgaaacagaaaaaagcagaaaacggcgtcaaggcagaaagaaaacggaaaccgcgcttgcgtatccgaagacaagggcggcgtctaaacagaatccggagaaaaccatctcttccggttgaatatcaaaaagaaaaaacgatatgatgggactatagcctgaaaacgacatgaaggagatgcaggatgtacaaactaattgcaattgatatggatggaacacttttaaatgatcatcatgaagtaacagaggaggtccgcgacgcccttcacgcggcaaaagcggaaggtgtcaaaattgtgctttgcaccggccggcctatcgggggtgtgcagagatatttagatgaactgaatttaattgaagaaggcgactatgtcattgcgtataatggagcgcttgttcaaaatacgcatacaaatgaagtggtctcggagctgtctctcggctatgatgatttgacttcattatatgacctgagcttagagctgaagacgccgatgcatttctttgactcatctaatttgtatacgcctaaccgggatattagcgaatttaccgtatacgaatcctatgtgacacaggttccgcttcatttccgcaagattgacgaggtgccaaaagatatcctcatcccgaaagtgatgtttattgataaaccggagaacttaaaccgcgtcattacatcgattccaaaagacgtgagagaaaaatattcaatggtcaaaagcgcgcctttcttttatgagattctgcacccggaagccagcaaaggaaatgctgtacgccagctggctcagctgcttggaattgaacaggcggaagtcatgtgcataggcgacaatgggaacgacctgacaatgatcgaatgggcgggctgcggggttgccatggcaaacgccatcccagaagtattggaagccgcaaactttcaaacacgctccaataatgaacatggtgttgcgcatgcgattcacgagcttgttttggctaaataataaaaaatccagccttctaaaggctggattttttcgttttatttgatgtaatgtcaattctttgacgaaccgatttgactttcgttatgctgataaaaccaattcgttcacaatatgtatgatattaatctgaattgaaaaggggactgatcaaatgtgcacaagtcttacattggaaactgctgaccgtaaacatgtattagcgagaacaatggattttgcatttcagctggggacggaggtcattctctatccgcgccgttacagctggaagagtgaagctgacggaaaggcccatcagacacagtacgcgtttatcggtatggggagaaaacttggaaatatattatttgccgacggtgttaatgaaagcggtttatcgtgtgctgcactttattttcctggctatgcggagtacgaaaaaacgatacgggaagataccgttcacattgccccgcatgagtttgtgacatgggtgctgtcagtctgtaagtctttggaagacgtaaaagaaaagattcgatctttaacgattgtagagaaaaaattagatctattggatacagttttaccgcttcactggatattgtcagaccggacgggccgaagcctgacgatagaaccgagagcagacggcctcaaagtctatgataatcaacctggtgtcatgacgaacagccccgactttatatggcatgtaaccaatctgcagcaatatacaggaatcagaccgaagcaattagagagcaaagagatgggcggattagccctttctgcttttggccaaggcttaggaactgttggtctgccgggggattatacaccgccttcccggtttgtcagagctgtttatttgaaagaacatctagagccggcggccgatgaaacgaaaggtgtaacagccgcttttcacattttggcaaatatgacgataccaaagggcgcagtgataacggaagaagacgagattcattatacgcaatatacttccgtgatgtgcaacgaaactggaaactactatttccaccactatgacaatcggcaaatccaaaaagtaaatttatttcatgaagaccttgactgtttggagcctaaagtgttttccgctaaagcagaagaaagtattctagaacttaattaagattcaattagctgatttcggtatgaatccgggatcagcttatttttttatgtgatgtctcagcttctgaatgagttggaaaatggaccgttctacgacggcgacacgcgcgtttattagcaaagagcaaaagcgacggcaaaatgcgtatggtcggatgtagagataaggtacaagctacatttatataaaacttggatcaaaacgaggttcagcatcagactggttttgccagtatacaggttgcacaaatgccgtcccatgatactgcgaaatgcttttcagcttaaaaagaaaaatttaatcttaactcattgacaaacgtccaagacaaaggtacattttgatttattcatattaaacgactaggaatataggagtttatttttcggattattcagcctaaaaacatgataaaaggagtatcgccatgacaagcaaaaagaaacaaatcaaattaggggtatttttagcaggtacaggccatcatgttgcgtcttggcggcacccggacgcgccgtcagatgcgagcatgaatttggattattttaaagagcttgcgaaaacagcggagcggggcaagctggatatgctgtttttagcggacagcctttctattgacagcaaatcacatccaaatgtattaacaaggtttgagccattcaccctgctctctgctttggcgcaggtcacatcaaaaatcggactgacagcaacagcctccactacatacagcgagccattccatattgccagacagtttgcttcattggatcatctgtccaatggccgtgccggatggaacgtcgtcacttcatctattgaatccacagcgctgaatttcagcggtgaaaagcaccttgaacaccatttgcgctatcagcgggcagaggaatttgtcgaggttgtaaaggggctttgggattcatgggaagaggacgcctttatccgtaataaagaaacgggtgaattctttgacaaagaaaaaatgcacgagctgaaccacaaaggagaatatttctcggttcgcggacctctgaacgtttcaagaacgccgcagggccagccggtcattatccaggcaggttcatcaggagacggaaaagcgctggctgccaaaacagccgaagtgatcttcacagcacaaaaccacctggaatcagctcaagaattttatcaatccattaaagaacaggctgcggaattcggacgtgatccagaaaaaattgccatcatgccgggtattttcccaatcattgccgatacagaagaagcagcgcaggccaaatacaaggagcttcaagatctgattatcccatctgtcggtctgcaaattctccaaaattacttaggcggaattgatttgtcggcatatccgcttgatgggccgctgccgaagcttgacgcagaagcttccaatgcggtgaagagccgcttcaagcttgttcaggagatggctgaacgtgacaatatgacgatacgagagctttacaaatacgttgcaggctccagaggccaccatatcttcgtcggcacgccggagcagctcgccgacaagatgcaggaatgggtggatacgaaagcgtgtgacgggtttaacatcatgcctccgcttcttccagaaggaattgaagtgtttgttgatcaagtggttccgattttacaggagcgcggcgtgttcagaaaagaatatgaaggcacaacattacgagagcatttcggtttggaaaagccggtaaaccgctatgcaaagtaaggaggaacgctagatgaggccacgataccgccttgcagttgaacgtgatgccgaacagcttctcgagctgacattgcgggcttatgaaccgattcgaaagctcggcattcgttttgctgccgctcatgcggatttggatttggtgctgaaaaatattcgggaaaatgcttgctacgtcatggaagaagacgggcggatcatcgcgaccatcaccttgagaatgccttggggaaaacagccgggaccgtatggcgttccgcatatctggtggtttgctgtggaccccgacaccggtaaaaaaggaatcggaacaaagctgcttcaatggctggaggaaacaatccttcgcgatacgttaaaggttccgtttgtctcactcggaacagcggataagcatccgtggctgattgagatgtacgaacgaaaaggatatgtccgctcaggtgaacaagaccttggaaaagggcatatcacagtctatatgaaaaaacaattgcgacatgatctataaaaatagaaaaggcgggaaaatcaaatgaagatgaaaaaatggacagtgctggtcgttgctgcattattagcggtgctctcagcttgcggcaatggaaacagcagcagtaaagaggatgacaatgtgcttcatgtcggtgcgacaggacaaagttacccatttgcttataaagaaaacggaaagctgacaggctttgacgtggaagtgatggaagcagtcgctaagaaaattgacatgaaactggactggaagctgcttgaattcagcgggctgatgggagagcttcaaacaggcaagcttgacaccatttccaaccaggtagctgtgacagacgaacgtaaggaaacgtataactttacgaaaccatacgcttatgcgggaacacagattgtcgtcaaaaaagacaatacagacatcaaatcagtagacgatttaaaaggcaagacagtcgcagccgttctcggttcaaaccacgcgaaaaaccttgaaagcaaagatcctgataaaaaaatcaatatcaaaacgtacgaaacacaagagggtacgctgaaggatgttgcgtacggccgtgtagacgcttatgtcaacagccgaactgtattgatcgcgcaaatcaagaagaccggtttgccattaaagcttgcaggagatccgattgtttacgaacaggttgcattcccatttgccaaggacgatgcgcacgacaagctccgcaaaaaagtcaataaggcgctagatgaattgcgtaaagacggaacactgaaaaaactctctgaaaaatactttaatgaagatatcacagtagaacagaagcattaagaaacggcggtgactcaccagaatgaacacgattgattgggaattcatgatatcagcgttcccgactttaattcaggcccttccgatcaccttgtttatggcaatagcagctatgatttttgccattatcggaggacttattctcgcactcattacaaaaaacaaaattccagtgcttcatcagctgtcaaagctgtatatatcctttttccgaggcgtgccgacacttgtacagctgttcttaatctattacgggctgccgcagctatttccagagatgagcaaaatgacagctctcacagctgccatcatcgggttaagcttaaaaaacgcagcttatttggcagaaatcttccgggctgccctcaattctgttgatgacgggcagctggaggcgtgcctgtctgtcggtatgacaaaatttcaggcatacagacggattattttgccgcaagcgatccgaaatgcgattccggcaacgggcaatacatttatcgggctcctgaaagaaacgtcactggcctttacattaggggtcatggagatgttcgcccaagggaagatgtacgcttcaggaaacctcaaatattttgagacgtacttggcggttgcgatcgtctattgggttcttaccatgatctacagcatgttgcaggacttgtttgaacgtgccatgagcaagccataccggacttagaggtgaaatcagttgataacagtaaaaaatattcgcaaagcgtttaaagatctcgtcgtgctcgacggaatcgatctagaagtgaaacgcggagaagtggtggcaatcatcggtccgtccggttccggaaagtcaacgcttctccggtgcttaaatttattagagcgtccggatcaaggccttattgaaatcggagaagccaaactcaacgcggaaaagtttacacgcaaggaagcatatcggcttcgccagcaaacggccatggtctttcaaaactacaatctgtttaaaaataaaacggctctgcaaaacattacagaagctttaatcgtggctcaacataaaccacgcgacgaagcgaaacgtattggaatggagattctgaaacaagtcggtctggagcataaggctgacagctatccgatcacaatgtctggcggccagcagcagcgaatcggcattgcgcgggcgcttgcggtcaatccgcatgcgattttgctggatgaaccaacgtcagcgcttgaccctgagctcgtcacagaggtgcttcaggtcatcaagtccattgcggaaaaacaaacaacgatgatcattgttacacacgaaatggcgtttgcaaaagaggttgctgatcaagtgatttttatggcagacggccatattatcgagcagggaacgccagaggaattgtttgaccaatcgaaaaacgaacggacgaaacgatttatcaagcaggtgggagagcctgcagagcttatataagaaggagagaagaacaatggccgacaaaacgtttcatacccgtttaatcaatatgcggcgtgatcttcatgaacatcctgaactgtcatttcaagagattgaaacgacgaaaaaaatccgccgctggcttgaggaggagcaaatcgaaatacttgatgttcctcaattggagactggcgtgattgcagaaatcaaaggacgggaagacggccccgtgatagcaatacgagcggatattgacgcgctcccgatccaagaacagacgaatctcccatttgcatctaaggttgatggcacaatgcatgcatgtggacacgattttcatactgcttctattattggcacagcgattttgctgaatcaaagaaaggccgagctgaaaggtacagtccgctttatctttcagccggccgaagaaattgccgcaggagcaagaaaggtcatagaagctggtgtacttgatggcatttccgcgattttcggcatgcacaataagccggatctgcctgtcggaaccattggtgtaaaggaaggtccgcttatggcaagtgttgaccggtttgagatcgtcatcaaagggaaaggcggacacgccggcatcccaaataacagtattgatccaatcgctgcagccggacaaatcatcagcgggctgcaatctgtggtcagccgcaatatcagctcactgcaaaacgcagtcgtcagtatcacaagagtacaggcgggcacgtcgtggaacgtgattccagaccaagctgaaatggaggggacggtacgaacctttcaaaaagaagcgcggcaggctgttccggagcatatgagacgagtggctgaaggaattgcagcgggctatggggcacaagcagaattcaagtggtttccttatttgccttccgttcagaatgacggcacatttttgaatgcggcatccgaagctgcggcacggcttggctatcaaaccgttcacgctgagcagtctccgggcggagaagacttcgctctgtatcaagagaagattccgggattttttgtctggatgggaacgaacgggacggaggagtggcatcatccggcctttacactggatgaagaagcccttacggttgcctctcaatactttgcggagctggcggttattgtattggagaccatcaaatgagcaaacaagggctgacagcaggtcttgcagcggctgtgagaacatcacaacctgagcattcagttgacgcgattcgcgaagcaaaaaaaggattacttgattttactgccgcttcattcgcaggaagagaagataaaggaattcaaaagctcctccgtctgatagaggatgaaggaggccggccccttgttcctattatcggacagggcaaaaaggccgcgccattacaatccgtgatgctgaatggatttatcgcccatgcattggattttgatgatgtccactccgatgtaagaggacaccccagtgccgtcatcgtaccggcccttattgcatctgccgctcgcggacatgacgagcggcttcttggcgcttatattgttggtgttgaagtgatggcacggctgggagaatcaattggcagccgccactatgaaaagggctggcataatacaggaacgcttggtgccatcgctgctgcctgcgccgtaggttatgctgaggcgctgactcaggaagagctggaaaaagcaattggttttgcggctacacaatctgctgggatgagggtgcaatttggaacagaaatgaaaccactgcacgccggtttggcggctcaggctggcttgctggccgttaagctggcccaatcagaatttggcgggtcccgcacggcacttgatggagaaactggtttcttcagtctgtacggtgacgttgaaaaagcacaacatactttgctaaacgattggggggcaccgtggagaattgtgcagccgggtctatggtttaaaatctatccattttgttccgcggcacaccatgctgcagatgcggtacgacagcttatctccgaagaaaccatttctgcgaccaataccgaacgtattgaagtgatttttccgccaggcggagatgctgcattgacggaaagatctccgaaaactggagaggaaggccgtttcagcgttgaatatgtgattgctcttgctttgcatggacacggcctgaccgttgaacatttcaacagccagccgatcccaaacggcgttcaaacgacaataaggcatattcagcgcgtatatgacaatgctattcagccggctcctcatgccgttccaaaaggccgtttcacgattgtccgggcctatttatcagacggccggatttgcgaagcgcgtgtggactgcccaaaaggggcgccaggaaatgagctgtctgaagaagacataaaagaaaaattgacattaacggtcccgcaagaaaaagcgcggagaatcataacagccgttgaaaaagccgatataaaagaatttttagctcatattgaataagatcaactctattcgatgatttcagatgatatgataaaaccaattatacgtttgaaaaaggagaaaaccatgacggtgaatgacgcggttgtattcattttggctgcctttttactatggggagcggcggattattgtttgggaaacagatgggggctaggcgagcggtttgcggacggctttaaggctatggggccgctggcgctgtccatgatcggaattgtgtcgctggcgcccgtgctggcagcaatcctgattcccattgttgctccgttttacacagcgattggcgcggacccttcttcctttgctaacaccattttggcgattgatatgggaggatatgcgctggctggagaaatggcgaaagatccgcaggccgggctgttttcatgggtgtttttaggaacaatgatgggaccggcaatcgtcttcacgattcccgtcgctcttggcatcatcgaaatagaggatcatccgtattttgcgaaaggcatattaatcgggctgtgcacagtgccgatcggttgtttcatcggcggattatgcgcgggctttgacatcggcatgataggtaaaaaccttctgatcccgagtctgttatctgctgtgatcgcttttgggttatggcgatacaccgacagaatgattcagttgtttcatctcttcgggaaagcggtcagtgtggttgcgattatcgggcttgcagctgtttcagttgaaacgatgaccggcattgtgctgattccgggaatggagaatgtcgagacagggatacaaacgacagggaccatcgccattgccctggcaggggcgtttccaatgacggcttttattacaaaaacctttaaaaaaccgcttcaggccctggggaaacaccttcatttagatgagacagcaacagcaggattagtgacctctttggcgcatcatatcccgatgctggcttcattaaagaatatgacgccgagaggaaaggtcatcaatgtcgcgtttgcggtcagcggcgcctttgtactcggcagccatctcggttttgtagctggaatgaaaaaagaaatggcggcggccatgatcattgggaaattagcaggcggagtcacagctgccgcagcggctgcttggatgacacctgcacaatcagctaaacagcaaaaacgtatctcagccagccatagctgaggcagaagctgtttcaactttgtccaatcgggaatgttacagtaaagatttctgtgaaagagggttggacacatggcggtgaaagaccggtacatgtcaaaaataaaacaggaaaccaagccttggatcaaacgattcgggaggcttggttattttgcattcggcggcgtttttattctgcttggggttttggcttttatgacggctgccggggcaggccgcgccaaagattcgagcggagctctccaaacgctatcacgcatgccgtatgggtcactattgctttttcttataggcatcggccttatcggctatgtgatctggatggtgttaagcgcgatcaaggacacagaggggcacggaaacagcaggcgaggcctgtcacggagaataggaaactttttcagtgccgccgtttacacatccatcgcttggaatgccttgcgatttgtgtttggccaaggggacggcggcacttcagaacagacgtggtccgcttatgtattggcgcagccattcggccaatggctcacagggcttacgggtgcgggttttatcgtatttgcgattgttcaatttatgaaaggcgttcgggctgcttttatgaaagaatttgatacgtcaaaaatgaacaaacaaatgatatgcatcacgaaaaacaccggacgcgcaggcaatatcgcccgggccattattttctctgctatcggctactttctcatcaagacagccatgaccgctgatcccgacgacacaagaggctttgacggcgcgctcgccgaactcgcgcagcagccgcatggcaaattgattctgtctatattggcattaggcctgatcctatatggaatgtacgccattatgaaaggcatttatcagcatatgacctgggagaagtaagctctgggcaggtccgcgcccagagcgtttttcagtttcttagaaatcaggtggatgaaagttggcgccagcctgtataataaaagcaaatcaaaagcagttttatcaggactgatccacagggaggtgcagaatggatcgggaaaaacaacaattaagcatagaagcggcaaggctttactatcagtctgactacagtcagcagcaaattgctgagcagctcaacatttcaaggccaaccgtttcccggctgctgcaatatgcaaaggaaaaagggtatgtccagattcgcgtcatggacccttttgaggatttggatgcgctcggttccatacttgaagagaaatacgggctccttgaggcgcatgttgtgttttccccgacacccgattatgcaggaattacacatgacctaagccgctatggtgcagaatatatgcatgaaacggtaaaagacggcgacattgtcggcgtcagctggggaaccaccatgtatcaaatcgcacaaaacatgcagccgaagcaagtaaaaggcgtcgaggtcgtccagctgaaaggcggcatcagccattcccgggtaaacacgtattcggctgaaacgattcagctgtttgcagaggcttttcaaacgatgccgcgctatctcccgcttcccgtcgtgtttgataatgcggatgtgaagcgaatggtggagaaagaccgtcatattgaacggatcattgagatgggcaagcaggcgaatatcgctctcttcacggtcgggactgtccgtgacgaagcgctgttgttccggctcggatattttaacgaagaagagaaagccctgctgaaaaaacaggccgttggcgatatttgttcacgcttttttgatgcgaaagggaatatttgcagcagtgccatcaatgaccggaccatcggtgttgagcttgaagacctcaggctgaaggaacgctctattttagtggctggcggaagcagaaaagtatcttccattcacggagcattaaccggaaaatatgccaacgttttaatcattgaccagcataccgcaagggcgcttgttaatgatttgtgacacgttcaaacctttcattgaacaaaatttcaattaccaatttacatatgttcaaaagtcggttatgctaaaaaatatcttaacaaaaaaggaagtgtgcgaaggatgtcattagccaacataattgatcatacagctttgaaaccgcatacacaaaaagcggacattctaaaattaattgaagaagcgaaaacatacaaatttgcttcagtatgtgtcaatccgacatgggtggagcttgctgcaaaagagcttaagggaactggagtcgacgtttgtacggtcatcggcttcccgctcggtgccaatacaactgaaacaaaagcgttcgaaacaaaagacgccatttcaaaaggcgccactgaagtggatatggtcattaatattgccgctttaaaagacaaggaagacgatgtggtggaagctgatatccgcggtgtagtggaagctgcagccggaaaagcgcttgtcaaagtcattatcgaaacgtgccttctgactgatgaagaaaaagaacgtgcatgccgtttagcggtgtctgcgggagcggatttcgtaaaaacatcaacaggcttttctacaggcggcgcaacgaaggaagatatcgccttaatgcgcaaaacagtaggacctgatatcggcgtgaaagcatctggcggcgtcagaacgaaagaagatgtagacacaatggtagaggccggagcaagccgaattggcgccagcgcaggcgtttctatcgtaaaaggagaaaatgcatcaggcggagacaactattaagagctgacggaaggcagactgctttccgttttctgaggaaacagtgattgtaagcgaatacaaataaaggagaaacacatatgaagtatttgattgggattatcggtttaatcgtgtttttaggcctcgcgtggatcgcgagcagcggcaaaaaaagaattaagatccgcccaattgttgttatgctcattttgcaatttattcttggctacattctcctcaataccgggatagggaatttcctcgtgggaggatttgcaaaaggattcggttacctgcttgaatacgcggctgagggaattaactttgtgtttggcggcttggtgaatgcggaccaaacgacattctttatgaatgttctcttgccaatcgtgtttatttccgctctgatcgggattctgcaaaagtggaaagtcctcccgtttatcattagatatatcggccttgccctcagcaaggtaaacggtatgggaagattggaatcgtataacgcagtggcttctgcgattttagggcagtcagaagtatttatctccttgaagaaagaactaggtcttttaaatcagcagcgcttgtacacgctttgcgcatctgcgatgtcaactgtatcaatgtcgattgtcggcgcgtatatgacaatgctgaaaccggaatatgttgtaacagcgctggtcttgaacttatttggcggtttcataattgcttctattattaatccgtacgaggttgcaaaagaagaggatatgcttcgtgttgaggaagaagaaaaacaatccttcttcgaagtgctcggagaatacatccttgacggtttcaaagtagcggttgtcgtcgctgcgatgctgattggatttgtcgcgattattgccttgatcaatggcatttttaatgcagtattcggtatttcgttccaaggcattcttggatatgtgtttgctccattcgcttttcttgtcggtatcccatggaatgaagctgttaatgcgggaagcattatggcaacaaaaatggtatcgaatgaatttgtcgccatgacgtcgcttacgcaaaacggtttccatttcagcggccgtacaacagcgatcgtatcggtattccttgtgtcatttgcgaacttctcctcaatcggaatcattgccggtgccgtaaaaggactgaatgaaaagcaaggaaatgtcgtcgctcgtttcggcttgaaattattatacggtgctacgcttgtcagctttttatcagcagcaattgtgggcttgatttactgaacttaatcgaaaaggatcggtgaccaaacatgagaatggtagatatcatcatcaaaaaacaaaacggaaaagaactcaccactgaagaaattcaatttttcgtgaacggctatacagacggaagcattcctgattatcaggcaagcgcgcttgctatggcgattttcttccaggatatgagtgaccgtgaacgcgcggacttgacgatggctatggtgaactccggtgaaacgattgatctttctgccattgaaggaattaaagtggataaacactccaccggcggcgtcggcgacacgacaacactcgttctcgctccgcttgttgcggctcttgacgtaccggttgccaaaatgtccggccgcggcctcggccatacgggcggcacgattgataagttagaggcaatcgacggcttccacgtggaactgacgaaggatgaatttattaaacttgtgaaccgcgacaaggttgcggtcatcggccaaagcggcaatttaacgccggctgataaaaaactgtacgcgcttcgtgatgtaacgggaacggtcaattccattccgctcattgcaagctcgattatgagcaaaaaaatcgctgccggggcggacgccatcgtgcttgacgtaaaaacgggagcgggcgccttcatgaaaacagaagaagacgcagctgaacttgccaaagcgatggtacgcatcggaaataacgtcggccgtcaaacaatggctgtcatttcagacatgtcccagccactcggctttgcgatcggaaatgcgcttgaagtcaaagaagcgatcgacacgctcaaaggcgagggacccgaggatcttcatgagcttgtcttaacgctcggcagccagatggttgtgcttgcgaaaaaagccgatacattggacgaagcgagagcgaagctggaagaagtcatgaaaaacggcaaagcacttgagaaattcaaggatttcctgaaaaaccaaggcggcgacagctcaattgttgacgatccgtctaagcttccgcaagccgcatatcaaattgatgtgcctgccaaagaagcgggtgtcgtctctgaaatcgttgcggacgaaatcggcgtcgcggcgatgctgttaggtgccggtcgcgccacaaaagaagatgagatcgatttagccgtcggcatcatgctccgcaaaaaggtcggcgacaaagtagaaaaaggcgaaccgctcgtgacactttacgccaaccgcgaaaatgttgatgaagtcatcgcaaaagtctatgacaacatccgcatcgccgcggaagcgaaggcgccgaagctgattcatacgttaattacagaataaaaaataaagcacatcccatcctgagcggggtgtgcttttttgattacaggatgtgatcagcctgatattcctcttggctgatttttttcgcctttgtaacatttcttttgaaatggtagatcagatagcaaaggatgatacaaggaactccacagaaaagtgcgattctttgattgggatcaaaagcaagaccgatacaagaagctgagcataataaaagagcggctataggcataagaggataaagcggcgtgcgaaatgtcagatcttttacattccccccttttttcagaaatctctttcgaaacaagagctgggacaaggcaatgctcatccagaccacgactcctgcaaatccagcaattgcgaccatcaccacatagacagttcccggggccacgatactggaaacgagagataaacaagatacagccatactgatcattaaggcatttaaaggaatgcctttagaggtcactttcttaaaacgggaactgatcatgttttcatttgctaacgaccacatcatacgggtcgaagcatataagcctgagttggcgacggacagcaaggctgttaatatcacgaaattcataatatcagcagcgtaagggattccgatctccgcaaatacggctacaaacgggctttcaatcacgcctgcgtccttccacgaaatcaacccggataatatgaagacagcgccaatgaaaaaaatcacggttctccatgcgacattacggatggatcgcggtatatccttttgaggatttgctgattctcctgctgtaacgccgattaactctgtaccggaaaaggcgaagctcacagatatcatcgcgataaaaacggcgagaaagccattcggaaacagcccgccatggtccgtgaagtttgacaacataggagcatccgccgttccgtttaaagagatcaggccaaacatggcggctcctcctaaaatgataaataaaataatggtgacaatctttacgctggaaaaccaaaattcagtttctgcaaataacttaactgaaaatgcgttgcatataaaaagaagggctgcaaaaatcgcactccacatccatacactgctgtcagggaaccagcgctgcatgagaataccggatgcggtaaactcagagcctaccgtcaccacccaattgatccagtacatgatgccgaccataaaaccggtagatggaccgataaatgttgtagcatatttttgaaaagagccggttaccggcatggcaaccgacaattcgccgagacattgcatgacgaggtacatcatcaacccgccgattacataagcgagtatcgtaccgccgggtccggcttgatgtagcgtatagcccgtactgaggaaaagtcctgtgcctatgacgcctcccaatgagatcataaataggtgcctgcttttcattgtgcgttttagctgttggctgctgttctcctgaagattcactgtctcgccctccttttagctgccattcattaggcagatgagtttcttatacccaaaatacaacctgccagaagatcacttgaatggggagagtttcattccttttaatgcgtgtaacagaacatgagctgcagctctgcttgtcatatctcgaaaatcgagggtagggtcgacttcaacaatttcaatcccggcaacattgggctgttgtgcgatgtacttgactgcttcaagcaattcgtctgtatagaggccgcccgggccaatcgctggacagccgggtgcatgggactggtctaagacatccatgtcaacagatataaaaatgaaatctgttctatcttgaacaacaggcaaaatctcttttatcgttgggattagtcctttttcccggatcatgtccatcgtgtgaatgttcacgctatgtttttttgcatatgcttcataggcctggctgttgctgaattctctgatacccagctggatcaaatgttggccttcaataatctcttcatccaaaaggcggcggaagggtgtgccgtttgtcggccccccgtcctccgtattgcgaacatcgtgatgggcatcaaattgaatcaccgctgtcgttccttttgtttgtgctatcgcttttattgtggagtagctgatagagttatctcccccgagtatgagcggcacccaatccggatgatccgaaagcagagcgtgcatggtttggaaaatgtgatgatgtgactttgcgatatcagtgacatgaatatcgatatcccccagatcatatagaagctctgatacgacgtgctctccaagctcagcagaataggctgatgaatgtttcagagcctggcgtattgttccgggtgcaaaggaagcgcctgaatgactgatggaggattttgatagggggacacctatcaacgccggtcccttaatgtcctgaccgtcccatgttgcgatcaggtcgctcatttttgtgacatcccggtctttaaacgaagatccggcctctctgagaaaagggtacttatccaagaatggctccctccctgttgacaacaattgttccgtttttcatgacttgatgtacatgattaaccccgtagtgatacggaatatacatatagttcgtggcttgccaaatgactagatcagctgagcggccgactttgagctgaccggcttcttctcctttccctatggcgtatgcggcattgactgtgaccgcgtgccatatttcttctgcagtcatcttcagatgaagcgcggcaatcgacatgatcagctggatattttcagtcggcgagctgccaggattaaaatccgttgccaagctgacacatacaccttcatcaatcatagctctagccctggcgtatgtgcttttgccaagataaaatgtcgtgcccggcaagaggacggcgatcgttcctgcctcagccaatttctttatgccttcgtccgatgcacctaccaaatggtcggctgagacggcctttagctcacctgctaattcagcacctccaagaggatcgatttcatctgcgtgtatttttaatccgaagcccgcctcagctgctttttgtaaataacggcgggattggctgactgtaaaaacgcctgtttctgtaaaaatatcagcaaagctggcgagctcctgctctttgatttccggcaaaagggaaagcatttgatccagaaattcatctggatcgttttgatattcgggaggaatcgcatgggctcccataaatgtggaaacaaggtcaacaggctggctttcatgcagtttctttgcgacacgcaactgtttgagctctgtctctttttccaagccgtagccgcttttcacttctgctgtggttgtgccgtaggacagcattctttgcagatgaaaatgggctttttgcagcagctcttcttctgaagccgccctggtatccttgactgtagacagaatcccgccgccctgcgccagaatatccaaatatgaaatgccctgaagcttaaggttcatctccttttcacgagatccgccaaatacaagatgggtgtgcggatcaacgaggccgggcgttacaaggcgtcccgaacagtcaatgatttcgtctgcctcgtaaccggcttcagcccctttttgtccggcgaacacaattttctgttcatggatgccgacaacagcgtcttcgatcacatgaagatcctgcatgcttttgcctgcccgcggaccgctgctttccatcgtcaaaagctgaccgatgttgatgagaatcgtatcaatttgctttggcatgtcatcactcctttatttttgcatcggcacgataatgtcctgttccttcgctacttcaacggcacgttcataacccgcatccgcatgacggataatgcccattcctgggtcgctcgttaagacccgcgcgagccgctcgtcagccagttcacttccatcggccactgcaaccatgccggcatgcagggaatagcccattccgacgccgccgccatggtggaaggaaacccagcttgcacccgccgccgtgttgacaagcgcatttagtacagcccagtcaccgacagcgtcacttccgtccttcatcgcttctgtttcccggtttggagaggcgacagacccgcagtccaaatgatctctcccaataacgacaggcgcttttagctccccagttctaaccagctcgttaatggcgaggcccatcttttttcgttctccatatccaagccagcaaatacgggacggcaagccttggaaggtgactttttcctgtgccatatcaatccagcggtgaagggctttatttgtcgggaacagctcttttaataacgcatccgtacggtaaatatctgccggatctccggaaagcgccgcccaacggaacggcccttttccttcacagaataaggggcggatgtaggcagggacaaaccccggaaaatcgaaggcattctccagcccttcatcctttgcgacttgccggatattgttgccgtagtcaaatacaatagagcccttttgctgaaaggccagcatggcttcgacatgttttttcatgctttgcttcgcaaggcgcacgtaaagctctggagtgtcttgacgcaaacggtcagcttcatcaagggaatagccctcgggaacataaccgattaaagggtcatgggcagatgtctgatctgtcacaatatcaattttgacgcctcggttcaaaagtgtgtgatgcacctcagctgcgtttccgagaagtgcaatggacaaaggttttcctgccagctttgcctcttcagcccaagctaaggcttcctcaatcgatgctgtttttcgatcgcagtattttgtttcgatccgcttgtcgatgcgtttctcgtcaacctcgacggcaatcacgacgccttcattcatcgtgactgacagcggctgggcgcctcccattccgccgagacccgctgtcagcgtcaacgttccttttaagctgcccccgaagtgctgtcgcgccagctcagcgaaggtttcataggttccttgcaatatgccttgtgagccaatgtaaatccagctgccagccgtcatctgtccgtacatcatcaacccttttttctcaagttcgtggaaatgctcccagtctgcccacttcggaacaagaacagaatttgctaagagcacgcgcggggcctgcgggtgtgtacggaacatgccaacgggctttccggattgcacgagcaatgtttcatcattttttagtgttttcaaggaatgctcaatggcgtgaaaagcgtcccaatctcgtgcggctttgccaatcccgccatatacgatgaggtcctccggcttctcggcgacttctggatcaaggttgtttcgaagcatccgaagcactgcctcttgctcccaccctaagcattcaagctctgttcctctgttggcacggattgatttttttacatcagtcatatgttcatcccccttagttctttattctgatggtcaggtattaaagattccttcttcagccagtcagtcaagcgttcaatgtcataggaaaaaacacgatcctgctgaatggacggcacgacttttctcatttcttgaaaaagctgtttcgtataggacgctgcatgttctatgcctctgtattcaacagcctgcaatgcgcaaatcgcttcgatcgcaatgactctccttgtatttgcgatcacctgataagcatgccgagcggcgatggttcccatgctgacatggtcctcttggttggcggatgacggaatggaatccacacttgcaggatgggccagtgttttattttcagaaacgagtgaggccgcggcgtactgcatgatcattgcaccggattgcagaccgggatgagggctcaggaacggcggcaggtcattcagctgcggattcacaagtcgttcgatccggcgctctgcgatattcgcaagctctgatattgcgattttcagaaaatccatggcaaaggcgatcggctgtccgtgaaagtttccgccggaaatcactttgtcaccgtcattgaaaatgaggggattgtctgtagctgcgttcatttcaatctctaatttttctttgacatagcctagtgtctgccaagtcgcaccgtgtacttgcggaatacagcgcaatgaataggcatcctgaacccgcagttctccctgggaggttgtcaggccgctatcagatagataaaagcgaaatcgttctgcgacatcgatctgctcctgatagccgcgggctgagtgaatatcctcgtcaaatgcatcgataattccctgcaacccctcaatcgttaagctggcaatgcgttctgtttgataggctagtttctcagcttcgatgtaggcgaccacccccattgcagtcatggcctgagtcccgttaatcaaggcaagcccttccttggatgtcagcgttaccggttgaatacctgcttttttcaagcctgtcattgccggcattctttccccctcaaaaaagacttctccttgtccgatcagcgcaagcgccaggtgggaaagcggcgccagatctccgcttgcgccaagtgatccctgctgggggatgacaggatggacgcgtttatttaaaaaagcaagcaactgttcgatcagctcagcgcggacaccggaaaagccttttaacagcgcattggcgcgcaaaagcagcattgccctggaaacacactcaggaaaagggtcgccgactccgcaggcatgagaaaggattaaattcaactgcagcgccgccgagtcttctttctgaatcaggacatcgctgaatttgccaaatccggtgttgatgccgtagattgtcttttcgtcgcgtacaatccgttccactgccgctctgctttttttcacgcgctccatactttcctcagaagccgctgcctcctcaaaatcaaacagcacacgagcgacgtcggctgttgtcaatgaagaaccgtctaaagtcaccataagcccaactcctttttctttactttggtaaagcgcccatacaaaaaggagctatgctgtgaacttctgtttccacgcatagccccctatcgtctaagatctatgggctgtttcatatgtgattaattccaacaccgaatgtctcgtgctcaagacctttaatcggcgccccgattgttccgtaaagcgagacagcaatccaatcgccttccgcttcactttcataaggatttcccctcaaaacggcaaacctcaagcccaccgtccgaagcagcgatcccagcagcatttcacctctggtcacgccatgcaaagcctccatcgtcgcatgataaagcgcatgtgactcccgataaccctcagattgaatgacaccgctctttttggaagcggtttcaattgcggctactactttatgcgcgtccattgatcctaccttgccaagacagaccctccatccgtctcgctccagctcctcaacctgcgtactttcttccgcctcattcagcagcaggagaacagacagccggccgatccgacgctctttatgcagtgtcatatgaatcactcaattcctaaaaattctgataactattaactgagtattatattaattggttcagcagcagaagtcaaaagattttttacagtctttaacaagttagattgctattgtaatagcgcgacgcagaaagccgcacattgcacacgaatacccagacagaagtgcaagcggccgctgtcatattgctgacaatgagaggtaaaatgccaaaaagaggcgaagttgccggagaaaagtcgacgatacaagaccggacaaagcgttcattacgtacgtaaatgaagaaacagaagtaattgaagaaggagaaacggcaaaagggttgaactatgaatagaggatatgcaagcagcagttctgtgccaaacagacatcagtctgacaatgtaagagaacagtgagaaatcacctatctgtttgaatatgaaaacatgcggctgttttaataggccggtgtttcttcatagagaaatgtaagcgcttaaaaaattaataaaaaagagaggcgaattgtttagatgttcaaccgattgttccgtgtatgttttcttgcagctcttatcatggccttcaccctgccaaactccgctaatgcacaaaaacccgtatttaaagaagtcagcgttcatgatccttccatcattgaaacaaatggcaccttttatgtttttggatctcatctcgcttcagcaaaaacaaatgacctcatgcaatggcagcagctgaccaacagcgtaagcaacgacaacccacttatcccgaatgtctataaagaattaaaagaaaccttcgaatgggcgcaatccgatactctttgggcggctgacgtcacgcagctggcggacggaaaatactacatgtactacaacgcctgccgcggcgactcgcctaggtccgccatgggtgttgccgtcgctgacaacatcgaagggccatacaaaaacaaaggcatctttttgaaatcaggaatggaaggcacaagcaacgatggaacaccgtatgacgcaacaaaacatccgaatgtcgtcgacccgcataccttctttgataaagacggcaagctgtggatggtgtatggatcatactcaggcggcattttcatacttgaaatgaatccgaaaacgggcttcccgcttcctggacagggatacgggaaaaaactgcttggcggcaaccatagcagaatcgaaggcccgtatgttctctacaatccagacacccaatactactacttatacctatcatatggcggtcttgatgcaacaggcggctataacatccgtgtggcccgctccaagaaaccagacggcccttattatgatgcagaaggcaatccaatgcttgatgtccgcggcaaagaaggcacattcttcgacgaccgttccatcgaatcatacggcgtcaaactcatgggcagctacacttttgaaacagaaaatgaaaaaggcaccgggtacgtctcaccaggccacaactccgcatactatgacgaaaaaaccgggcgttcctatttaatcttccacacccgcttcccgggcaggggtgaggaacacgaagtcagagtccaccaattgttcatgaataaagacggctggccggtagcagcgccctatcgttatgcgggcgaaacactgaaagaagtaaaacaaaaagatatcacaggaacatacaaactcatccagcacggaaaagacatctcagccgacatcaaaaaaaccatcaacatccagctcaacaaaaaccacaccatttccggggaaatgaccggaacatggaagaaaaccggaaaaaatacagccgacatcacgttagcgggcaagacgtataacggggtatttttacgccagtgggattcggtgagagagaagaacgtcatgacgtttagtgtgttgaatggcagcggtgaggctgtttggggatctaaataagatggagaagcgccttcgagggaaggcgtttttttatgattattattgactaaaagtaacagttaagcacgagggtgaatgtaaatgatagtgagattgaagacctgaattaaaagtccctgttgtgattattcaccctcatgcgaaattgtaaaaaacgtatttttagcaaattagaactggtataactcccctcaagacaatcctttttacctatttatccaatatgacccatcatgtaatatgaaaatagtctgtattgtaaagaattgacacagtttgatagaaacacgaggtgttgcggcatgcatagtgaaatgttgttacattcggtaaaagccgacttacatgaaaagcaggaacagatccatcaattaaaacgagtgctgcacgaaatcaggcaaatcaaacacgaattctccgaggcccagcatctcattcaccggcctcatcttaaccgggaggcatggagaggaacacatgctcagcggtttgaagatattcgtgaaggaatgaacaaagcatatcagcaaatcaaaagcgatcaagtcagcggaatcatcgaaagcatagaaggaaaaatccactcattagagggcgatgtctattccataagacgccaaattacgaggatagagcatgaaatagagaaggaaaaacataaaaagtgaggtgagcacaaatggcacaggaaattaaaatggtgtatggcacagtgaagaaagggctttctcagctcaagaattcagctgaactcaagtcctccttacccggccatctctcaggcagaaaccatttgaatgttgtgaagtccatcgagcaattaaataaggacatcaaagagctcactgaagcatatgcgtctgttctggccaagcatatcgcacaaacggaaagcgcggtaaacgccatgaaggaaacggacgaaaacatatcatcttccatgaaataaagcgcgggaggacaagggattgaaaacattagatgtccacgctcttcacgagggcattcagcatacgattgagaaactggacaagcaaaaacaacagctggagaagctggaaaaaagcgttgagcatctggcaggcatgaaggatgcgctgaagggaaaaggcggagatgccatccggaccttttacgaggagtgccacaagccttttctccttttctttggcatgtttatcgacgaatacaaaaaagtgctgaaacaaacacagcatgcgatttcctctgtagaatctgactcccacggcatgatcgcagaggcttttctctcacacgatgcgagacatggggtcaagcatgcacgagaagtgacagagcagctcactgatgcagtcaatcgccagacatcagccatcgggcccagtaactgcatctaaaagctccatccaatattgcttccatcgttcaatcgtttcctgcttaaacagagctgtattgtattcgagtacgaatgtaagccctccgtcggtttcgtcagccgtcagcgtgaggtcaaacttggctgttttccgttcaaacggatgcggctcaagctgaatccctttcattgttaaatcctttatattcgcattttgcattgaaaaaactgcatcgaataacggatttctgcttgtgtcacgctgaacctgaacatttccgatcaaatcctcaagtgggtaatcctgcgcatcaaaagcgctgagtgccgtttctttcacttcgttaagatagtcagcaaacgtcttttcacccttcggatacgtgcgcagcgccaatgtattgacgaacattccgatgacgcggctgacgtccgcttgagatcgtccggccacaggtgaaccgacgatgatatcgtcttgcccgctaagttttgataaaaatgcactgtatgaagccagaagcaccatgtaaagcgtggaatccgtttcttttgcaagcctgcgcagagcatcagcttttcctgcttctaatgaaaatgcaatgcggtccccctcaaatgtttgaacggcaggacgactgtagtcagtcggaagcgtcagcaccggcagctctccgtccagctccttcagccaatgctcttcttgcttcttgtaaagctcagactgaatgaactgctgctgccacacggcataatccttatattgaatacgtagcggctcaagggtttctccgtcgtacagctttgaaagctcctcaatcagcacaccgacagacgcaccgtcagaaataatatgatgcatatcgaacagcagcacatgctcagtgtctgaatgcttgataagccctattctgaacagtggaagttggtcgattttgaaaggcttaataaactcagaaacgatccgctctgtctcttcttccggggcttcgaaataggctatctcgcactcagcctcttcccagatccgctgcaccgtttctccatcttttatttcaaacgtggttctcaaggcttcatgacgctgcattaactgctgcatgacgctgttaagcctttcaacatcaagctcacctgtcaggcgcagaaccgccggcatgttatagctcgtttgcgcatcctcaagctgctgaagcacgtacatccgtttttgcggtgaagaaacaggatacgtatcttgtttctctgccgggctgatacttgcggctgtccctttttcagcagaggcaatcacctgtgccaagccctcaaccgtcggtgattggaagagatccttgagtgacagctcaacgcccagttcctgatgaaccaaggcaagcatcttcatgcctgctaatgaatgtccgccaatgtcaaagaagtggtcataagcgccgacttgttcagcctgaagcacctgtgcccaaatgtctgcgactttttgttccgttccattgcgtggcgcaacatatgaaacacctcttgaaacgttggcatcaggaatcggcagcgctctccggtcaatttttccgttccctgtcagcggcagctcgtccatttggataaataccgcaggaaccatatatgccggcaagtccttcgcagcatgctctctcatctcttgtgataagatgtctccctctccgacatagtaagcacacaacagtttatctcccgctccttgatcaacggcaagcacaacactctcctgaacacgatcatgggtttgcagctgatgttcgatttctccaagctcgatgcgctgtccgcgaatcttcacctgatggtcgattcgcccgataaattcgatgtcgccattcggcagccatctcgcaaggtctcccgttttatacatgcgttcgccggatgtaaacggatgtggaacaaatttctcctcagtcagttctggacggttgtaatagcctttcacgagaccttcgccgctgacgcaaagctctccggcaatcccggcaggctgcacgtgtcccgtacggtcaagaatgtatacttccgtattgctgaccggttttccaatcggaacagacagcgtgtgctcctccaattcatcaaccggatgatacgtcgcgaaaaccgtgctttcagacggtccatacatgtgaaggagcttgccctttccaaccgtttgcaaagcttttctgacatgctcaaccgaggcccgttccccgccaaacataatcttgcgaagcgttgacaagcatgccggattcaagtccacaagcaagtggaacaaagcggttgtaatcatgagaatgctgatgttctcccgttcaatgacgcgggacaggcgagccatgtccaaaacggtttccttcggtatcagcaccagcttggctccgtttaacaaagagccgaacatatcgaacataaacgcgtcaaacacgtaattggaaagaccgagaatcgtatcctgttctgtaatgctgagataattcgtttccttcaccgtgcggaggatattggcatgtgtcacgatattccccttaggtgttccagtcgttccggaagtatacgtcaggttggccattgctgcagaatcaagaggcagtgcgagatttcgcgcatcggcatgatagctttcttcctcatcggctagcacgataacgcccttaaattccgcttcttccgccaaagcctttaatttcctctgagtgagaagcacctttgctccgctgtcacggaagaaatgctgcatccgctgaatcggatgttccggatcgatcggaacataagccgaacctgattttaatactgccaagatcgacacaatcatatccattgaccgctcgcataagacagccgcagttctgccttcgccagctccaagagaaagaatgccgcgggctaaacgattggcccgttcattcagttcacgataagtgagtgattcgccttcatattgaagcgcagtgtggtctggcgtattcgtcgcttgctcctcgaacagctgaacaattgttttatctttaggataaggtgttctgcccgggttaaactgctgaatttgcgaagcggcctcctcttcagaaagaagcttatactcagaaatcggcttctctggatcagccgcagcatcttcaagcaaacgcgcaaaatgcgtaagcagcctgtttgccgtgctttgtttaaacagcttcgtgctgtaatccaaatcaagctcaatgccttcatcggtttctctcgcctgcaccgtcaaatcaaatttggcaatcttgaaattggtctcatgaacagacaaggacagatcgccgacagacggaatgccctctgtcgcgttttgaaggctgaacatcgtgtcaaacagcggatgcctgctaacatcacgcgggatgttcaaatcttcaacaagccactcaaacggatagtcctgatgagaaaaggcatccagcacccgtttgcggacacgcgagatcaattgggtaaacgtctcatcctgcttcacctcactgcgaatcgcaagcgtattgacgaacatcccgataatgccctctgtatcggagtgatttctgcccgctgacggtgtcccgacaatgatgtcatcctgccccgtatactttgacaaaagcgtatagtaagcggaaagcatcaccatatataaagtggcgccgttttgttcagccaaacgattgaggcgatcctttacccccgcatccagcttgattgacacccgatccccttcaaagctttgaacaggcggtcttgggtaatcggacagaagctgaagtaccgggagctcgcctgcaaagacttccttccaataagcctggtccttcttgtacccttcagcagcctgtctgctttgccatacagcgtagtccttatactggagacgaagttcaggaagctgttcgcctttataaatgcgtgctaactcctccagcataatgccaatggatacaccgtcagaaatcaaatggtgcatgtcaaacagcagcatatgacggttctcttcaagccccagcaaaccgattctgaacagcggagctttcgccaaatcaaatttccgaacgaatgaagccataattgcctcatctgagcggccgcctctttcaatcatttcgatgttgaaatcaacgctgtcgtgaatgttctgtctcggcgtgctgttttcaagaacaaatgatgttctcaatgactcgtggcgtcggattaacccctgaaatgcgcgctccagtttttgaatatctaaaggcccttccagaattgctgccgcaggcatgttgtagccgactcccgcatcctcgaactggctgacgatatatgttcgctgctgtgccagagaaagcggataatgctcctgtttttcagcaggttcaatcaccgcaaaagctttgctttctctgtgatcagcttcctctgcaagagccgcaatcgtcggatgctcaaacaaaaattgaagcggaatctcgatgcctgtttccttatgaatctttgttaaaagggtcatggccttcaatgaatgcccgcccgtttcaaagaaattgtcaaagatccccgccttcttaacgttcagcacgtcctgccaaatggctgcgattgctttttcagtctcatttcgcggcgctgtataggcagtgccgctgacagccttcacctctagcgcaaacagcttgcggcggtcgactttgccgcttggcgtaagcggaatttctgtcacttctgtaaagtaagccggcaccatatagtcaggaagctgtctggccgcatgctccctcaagccggctggcgcaaattcgcttccaggcttctgcacaacatatgcgcaaacctcaagatttccctgttcgtcagggcgtgccaaaacaacggcttttgcaacgtctggcgcctgctgaatcacggcctcaatttccccaagctcaatccggtatccgcggactttgacctggtcatcctctctgcctaaatattcgattgttccatctggaagccagcgcaccacgtctccggtccggtacatgcgatcgcccggcacgaatggatcttgtaaaaacttctcttccgttaattcaggcaaatgcaaatagcctcggcccacaccgtctcccgcgatataaagctcgcccgccacgccttcaggctgtagccggcctttttgatccaaaatatataagcgattgttccccagcgctttcccgatcggcacatacgctgattgaactgcactctcagggataaccggatgaacagacgcgtcaacgcacgtttcagtcggcccgtatacattggtcaaacgcggcgctgtgcctgcttctttaaacagcttcagcagcttgtccgcaacaacagttgacaggccttctcctccgatcagcatgtgcttcagttttaggccttcaaaatcgcctgctgctgccagcatttgcaaatgagcaggtgttccatccgtcgcctcaatgctgtttctccgataatatgcagcaagggcggccccgttcgtcactgttttcttcggtacgatataaagggtttgtcccaaaagaagcgacgcgaagatctgcttcactgacgcatcgaagtggaacggcgcaagcaatgccatccgcagggtttggctgccgctttgataaatcgtctgctgcagagattcaaccaaatgatgaacctggcgatgctcaatcataacgcctttcggacgtccggttgttcccgatgtgtaaataatgtaggcaaggttccgtgcgttcacatctgcattcaggctttcttctgcaccttccgcaatcgcctgatctaagtcaatcagctcagcatcggcttcaggcgccgcaaccttcgattcagtcaggatgaagtccgccccgcagtcctccaaaatatattgaatgcgctcagcaggaaaacccggatcaatcggcacataggctccgccggcttttaaaatccccatgatagctgtaatcatccgttcagaacgttcaatcaaaaccgcaacaggactgtccgggccaacccctttctgtttcagcacattggcgatttgtgcggattgttcatgtaacattcgataggacaatgtacgaccttcaaatacaaccgctggatgatctgaaagctgctcagccttttcttggaacagttccgggatcgtcatgtccttacggtagctcacagattcaccgccggccctcgcaagcagcttctctttctccgcatcagaaatcatcgttaattcatcaattgtatgttctggatgcgttaacgcgttctccagcatcgtaatcatgcgctcacaaatcatgttgatttcttcacgtgaaaataaatcagtgcggtaatcaaaatcgatggtgagtttcccagtatcccatcgatccttcacatggatcgagacatcatttaatccgctgccgctgaaaatcggctcagtcaaaaaggcaaggtcctcttctttttgccactgcatcacctgatattcaagagaaacagtaaacagcttggtcagagagctctttgtttcacgcaaatcgttgatcagaagattatacgggtacttttggtggcggagtgtcttcatgagatccttcatccggtctttgacaaattctgaaaacgcctgcccgccgtcaatgtttgtccgaagcggaaccgtagaaacaaacatgccaagcatctgcttctctttcgcatttgtccggttgcccataaaggttcccgtcacaacatcattctggccgctgaccctgtacaaataggcggcgagcagcgattgaaataccgaaagaacactgactttattcgcctcacaaaacgacagaatctgcttatgaagcgcttcaggcacatctttagagaacctctcagcatctaaacttccccctgcggatgcattccgtttcagggaaacaagttcaggcaccgattcaaattgcttgttccaaaacgccttgtccttttcaaaccgcttcgattgagcatattcctgttcagataaaacatgatcgataaatgaatgcgagattccttcttttgtctctgagccgctggctaattctaaataaatgtgcatgatcgcattcccgagaatattcatggagataccatcagaaatcacgtgatgaacatttgcgtaaaaccacacttcattttcctttatggtgaacaagaaaaaacggaacaaatcacaatcgtatagcggcaaaggtttcttcgtttcctcccggctccattgtgaaataaactctatcgcattcggatcttcagtagtgtcagtatgttttatatcaacaggccgatactcgctaatatattgaacaggctccccgttttcatctagccgcaaacgaaggcgcatggcgtcatttctgcgaataaactcttgaatcgcctgctcaacaagcacataatcaatcgcatcagctgaaaccagcttaccaatccccgcaagatttgaaatgctcgtgtgaggataaaatttttctgtgtaccaaattcgtttttgtgcatccgttaaagggtaaaaagttatttccatattgtcatacctcccctaatctttataagcagtgaacatgtgcaacgcattttctctttcttatccatatcagcttttaattcttatgaactaacagccgaaatagcccaaagtactacacttaaaaagcagtacttccaaacaaaaaaaacagattgccgctataaaaacgggcagccgtcagtcagcattgcggcgtttaacataagcggataaagaccgcaagatcccctatcctaataggaaacaattttggctatttattcattgttttcaatattttttatcttactaccgttcactttaaatgaaaaaaatgtttttatcaccgaaaaatgggtgaaaagtttcatgcgggatgccgaaagattccagtttatttacagggatatttttgcgggatgccgcaatcatttccactaaacattatttacagaaaaataaaaatttttaaaccgaactgctgcgttcaatctttttttattgctgactgcaatttacaatctttacatgactatgtgtaccgcgcaaaaaccgaaaaaaaggcaaaaaaaagacacccttgcgaagagcgtcttacaacgattctttcatgacatttttgtcgatatcaatcaattccatatagcctttcccccactcatacatggcttcaagaataggcatgaggctttctccgtgcggggtcagagaatattcaaccttcggcgggacaaccggatacacttccctgtgaacaatcatatcctgctcaagctctctcagctgattcacgaggatcttctgcgtaatatcaggaatcaatgtttttaattcattgaaccgttttgtgccttcttttcctaaatgccataaaatgagcattttccatttaccgccaatcactgcaagcgttaattccttctcacaattaaaccttttgtcgtccatccggctcaatagaatccccccttagtaacctttttgtatgttagatacgtatcatcacttacttacttttttgcagactcttttttcattatactcactcataaaatcaagcgaaagaaatctgattgcctctcctcacagtatcctccaagtaacttgttgacttcaaagtgcctacttctcaacaaaagagggaacctatagaatgaacaataattcgaaaaagggagtggatcaacaatggaattacagcttgcattagacctcgtcaacattccagaagccattgagcttgtcaaagaggtagaacaatacatcgacgtagttgaaatcggaacaccggtcgtcattaatgaaggcctaagagccgttaaagaaataaaagaagcatttcctcaattgaaggttcttgcagacctgaaaatcatggatgccggaggctacgaaattatgaaagcgtcggaagcaggcgctgacatcatcaccgttttaggggctacagacgacgcaacgattaaaggcgcagtagaagaagccaaaaaacaaaagaagaaaattttagtggacatgattaacgtgaaagatatcgagtcccgtgcgcaagaaattgacgcactcggtgttgactacatctgcgtccacactggctatgatcttcaagcagagggcaagaactctttcgaagaattaacgacaatcaaaaacaccgtaaaaaacgcaaaaaccgcaatcgcgggcggcatcaaacttgatacactaccagaagtgatccagcaaaagcctgaccttgtcattgtcgggggcggaattacaagcgcagctgataaggcggaaacagcttcaaaaatgaagcagctgattgcccaaggataactccgatgaaaacgactgaatacgtagcggaaattctcaatgagttacaccgttcagcagcttatatttctaatgaagaggctgaccagcttgccgatcacattctttcatcccaccaaattttcactgcgggtgcggggcggtctggcctgatggcaaaatccttcgcgatgagattgatgcacatgggcttcaacgcccatatagtaggtgagattctcactccgccgctcgccgaaggagatctagttattatcggctcaggatcaggcgagacaaagagcttgattcataccgcagcaaaagcaaaaagcttacacggaattgttgcagctttaaccatcaatccggaatcaagcatcggaaaacaagcggacctcatcatcagaatgcctggttctcctaaagaccagtcaaacggaagctataaaaccattcagccaatgggatcattatttgaacaaactttgctgctcttctatgatgcagtgattttaaaactcatggagaaaaaagcactcgattctgaaactatgttcactcaccacgcaaaccttgaatagcatcacacaaccggcctgaaaatcaggccggttttattttttaaaaataaaactttaaacccaaaaacccgataagtaatatgacctataaatcataaaaggaggaattatgttgataaaacgatttaagatgaagctaggaactaaaattctttgcctcgttttcgtggtgattcttttgttttcggcatcagttggcactgtgatgcttaaagaaattacagaaagcatgaaacaaatggcaactgaaaaagcgaaaggtgatctcgctttaagcagcacatatattgatgatgtcatgtcaggcgactggcaggtgaaaaacaataagctctataaagggcaaacacaaatcaatggaaatgaagatattgttgatctgcttggtgaaaaaacaggtgataccattaccattttccaaggcgatactcgtgttgcaaccaatgtcatgaagaatggcgaaagagctgtcggcacccaggcttcttctgaagttattgccgctgttttaaagaaaggaaagcgtttttacggacaagcagatgtagcaggttcttcttatcagactgcatacatgccgttaaaagatcaaaatgggaacatcatcggcatgctgtataccggagctaatcaaagtattttagcatcacttacacaatcacttttcactcaattcgctatcgttcttgttatcgtcattatagtatcagtcatccttgttttggttttcaccagaaaaatcaacaagcggctgaacgctttaaaaagcgcctttgaaagtgccggaaacggagatatgacaatagaggtgtcagacaaaaccggtgacgagctttcagaactaagcgtctattataataagatgagaatgaagctgaacgataccatacaaaccgtacaacaatcagcccttcagcttgcgtcagcctctcagcagctctcagccggagcagaggaaacaaatcaagcttcagaaaaaatcacagaagctgtacagcagattgcaaatggagcccaagatcagatcacccgaattgaaaacagtgaaagctcattaaaacaagcttcagcagacatccgggatatttctgcaaatactgccgctatcgctgacaaagggcagctcgcgcaatcaaaagcagacattggacaaaaggaaattgcaaatgtacaggcgcaaatggatgcgattcaccagtcaattcagaaaagcggagaaatcatacaccagttagacggccgctctaaacaaattgagcaaattttatcggtcatcacccaaattgccgatcagacaaacctgcttgcgctgaatgcagcgattgaagctgccagagccggtgaacaaggaaaaggctttgctgttgttgctgatgaagtacggaaattagcggaagagtctcaacagtctgcggggcagatttcaaaactgatcatagaaatacaaaaggatatgaaccggtctgcaagatctgttgagcatgtgaaaacagaagctgcagaaggagtcaccatgatccagcgcaccagagatgcatttaaggaaattgcagctgcaacaggtgaaatcagcgccgagattagtgatttatcagcatctgtaacaaacatttcagccagtgcacatcatataaatgattcctttgcagccaatacggccgacattaaagaatctactaaaaatacccggcaagcggctgcattaacagaggagcagtttgctgcaatggaggagattaccgcagcttctgaaacactttctcaattagctgaagagcttaccggtatcataagccaatttaaaatgattaatcaagccgcaaacggctgatgacttactatcattattgtaaattggcaatcgtattttgcttaaaacaaatatttcgatctgctaaaattacgatttctgcaataaactgagcgtaaaacataaaatttaaacctttacaccaaatgctttctggattactcttgtgtcagttttaaaagcgggaggtgaacatcacgacggacatcataaaaacaatacttctcgtcatcgtcatcatagcagctgcagctgtcggcctgataaaaggagactttttctcagctgatcaaaaaacgtctcaaacgaaagaatatgatgaaacaatcgccttcccttctgaccgttatcccgaaacggccaagcatattaaggatgcgataaatgaggggcactcagaggtgtgcactatcgacagagacggagctgaggaacgccgcgagcaatcattaaaggacgtaccttccaaaaaggggtatgacagagatgaatggccaatggccatgtgcaaagaaggcggtgagggagcttctgtagaatacatttctcccgctgacaaccgcggagcaggctcttgggtcgggcatcagcttaccgattacccagacggcacaaaggttttattcacaattcagtaaacagtacatagaggaggaacagcacattgatcaaatcatggaagccgcaagaactttcgatttcatatcatcaatttactgtatttcaaaaggattctacacctcctgtaatggattggactgacgaagcgattgaaaaaggatatgctgcggcagacggagccatttcctttgaggcacagcgaaatacaaaggcctttattcttttgcgcctgaacagttcagaaacagtaaactcctacgaaaaaaaagtgactgttccttttcatgtcacagaaaacggaattcatattgaaagcatcatgtctaaaagactgtcctttgatctgcctaaaggagactatcaattgacatgctggactgtgccggctgaaatgtcagatttgcacgccgacacttatattattgatgctgtttctgtgtaatgaaaaacccctgagagaataactctcagggactctttataaactttctccgtttgtcttgatgacatcttgataccaataaaagctttttttcttcaagcgttttaaatcggatgtgctttcttcatcacgattgacatatacaaatccgtatcttttttggtagccgttcagccagcttaacagatcagtaaacgaccagctgcaatagccgattaaatcgacaccgtcactgatggcttgtctgcattgctcaagatgcgaacgcaaataatcaattcgataatcatcctgtacagtgccgtcttcaactttatcaaattcacccaaaccgttctctgttataaacactggaagctgatagcggcttgtaattcggcgaagaccgatacgcagcccaattgggtcaattgtccaatcccagttgctcgttgtcagatgcggattttttttcgttttgaacactccgggtatccccgtctcctgattggttcctttttggcctgtcgtattcattttcccttctgacacaccatcaagcggatttcgttcataggtgatcgtctgataataattgacacctacaaaatcaggcttccctttggcgagcaggtccatatctcctggttcaattgtcggcgcccatccctgtttttccaagtagcggaatggaatttgcgggtaggttccccagcaatacatgtcaagccaccaattgttcgtaaattcttcggcgttttcaaatgccagtatatcctctggatggcttgataaagggtaagccggagaataagcaaagctaggacctattttgccttcaggcacatattctctaaatgattcgatggcttttgcattagccagaaacgcaatatggtttgcttcgtaaaatcgttttctgtctttcactccaggcggatgcatggctgtaataaatccgtgattaaaattgtagttctgttcgtttaacgtaacccaatatttcaccctgtctccaaaacgtttataaagagtaatacagtagtgattaaaatcctctatgatgtttctggattcaaacccgccgtattcgtccataagcgcttgaggcaaatcccagtgatataaagtcagaaccggctcgatgtgatgagaaagcaattcatcaatcagtctatcgtaaaacgctagacctgcttcattgatctctccttttccttttggaaaaatccgtggccagctgacggaaaatcgatacgcttttaaccccatctcagccatcagagcgacatcttctttaaatcggtgataatggtcaaccgcaatgtcgccattggttcctttaaacgttttgcccggtattttcgtaaacacatcccaaacagaagggcctttgccatcttcattccaagcgccttcaatctggtacgctgcagaagcagagccccacaaaaaatgtttcggaaaagattctggatgctggtggatcatagtgtttatcactcctgaattattgataaacctatcataggctatgaaacgcgtttcagatcaactcgatgttagtcgcggaacagctcagctaatattttttctctttgtccaagaaaatatcgtgttaattgaacatgctctgtattctcatattcaatatgatgtattcttccaccatcaaagcttaaaatattagcattgggatagcccagtaggattggggagtgagtcgcaatgatcatctgtacatttccgcccttcaccaaatcatgtataactctcaaaaaagctaattgtctagctggagaaagtgctgcttctggctcatctaaaaggtaaatcgctttctctttaaaacgatgacggaatagagacataaaggactctccatgtgattgattgtgtagcggcctccctccataggaacggtatggctgaggagcatctagttccatctcatccagatgaagagaaagatgataaaacgattcagcccttaagaagaagccatttgttacctttggaagccaagataaacgtatataatctcctaaatgggaatctgactcccgtaattcatagacattatttcggcttccgcccgctgtattgaattcacacttatctgctatcgcttcaagcaaagtagattttccagatccattttcccccacaaaaaaagtcacttggctagtaaataagatgtcatttaattgacttatagccgggatagtaaaaggaaatctgtcaaagtccaaaatcttatctcgaagaaaagtaaccttttttaaaaacatagcatctcctttctatactcagttaaataatatattgagaaagatcttctgcatccataaaaacatagcccatcctagtattccaacacataatgcaaaccaaaacggcacatgaattttcagcaaaaaagccaaaatagctagtaaacaaactgtagctgggattcctgtaagcacaccagatgcaaattgacttaattgagctgttttttcaccttgtatttgcatccaaaaaaggcttaataagctgaccaagggcaaagcagcaatgatgccgccataggtcggatgtctttttgatatttcagtaacaaaaccgataatcaacgcagagatgatcactttacttaaaactgccattgtttagcttccctacttaaaagttcaaatgcctgttcaagtaattccttttctgatgtgctcattcgttcaattatttcttttaatttttctttatctagctgtgtatgctgttcaagaacagatcttccttcttgtgttaagaaaactaaaacttttcgttcatcctgttggcttcgccgtttagctataaatcccttttgaatcaaacgtttagtatgctctgacgctgtattgtgagagacagacaagtattcagccaaagctcctattgttgcctcaccttgcttttcaatatgctgcataatccgtattgcctggtgagaaatattatctatatgttgataatgtaataaataataaatatctgtccactgctgattaagtttagagattaaatccatttccatcattatacaccccatttatatcttattataagatataatcaacaaaagcgatatatttttccggaaaattcattcagtaacttttaacaataaaaaagcacccaattccaattggatgctttccatcttaatgtcttttttcaaatttatgcggatgaggatggtgctttggaacaaagccgttttgtttcatcatttcaaagtgtttgtccaagtgatttttgatgtgttctcctctttctttaggcaggataccgtattgtacatactttgagatcacgtctttgcgctttttaagaatctctgcttccagttgttcaatctctttcttttgctgatctgtcagtgtaacatttgcgggaggctgctgctgtttttcagcggcctcagctgtaccggtcagagaaatgacagccgctgcaatgaacattgtgatgatgttgatggttattcgtttcatccagtttattcctccaatcctatttttcatatgttttgctgccttgtattttttatgcataaaaataaaaagagcgaaccattattcgctctttctaatctcttcgtcagcattaagttcctcttcacctagtgtcgcataagtgacatatgttcccgcgattaaatcatgcagggtccgtttgtcttctcgtacggcaatcagaatcaggctggcgatcaagccgagtccgaaggttatacagtaaaccaggccggctacaataacctgttaaaacattgttaacagactaacgtgtgatccgtctttttttacgattctgattccgcagatcctttttccgataagataaccgcgccaaaacaccggcagcaaaatagaatacagcagaacaaacaggctggtttgtaactattcatttgactcccccattatggtttaaatgtttccgttttctttctcatcgaatatatcatatgccttaggggcatcagcaagactttaatttattctgaagatcgatttcatgcttcttgaccatttcttacggtattggcatagatgaatgacggatctgctgcatccttcacgtccacatgtgtttccttggtacgtctggcattcatccttggacaactccttttttcatcacctcttcccttcatagacgcttttaaacacccatccatgccttttgtatacacaattcgaactttttgaaaacgcgatcaacatattgcaaccccttatgttcaatgctatctttttagttgattaacagattgggggaactataggtgaaatcattcatgcattccaaagccgttatattcagtttcacaatggctttctttcttatattggcagcctgttccggcaaaaatgaagccgattccaaggatacaggctgggagcaaatcaaggacaaagggaaaatcgtagtcgctacatcaggtacgctctatcccacttcttatcacgatactgactctggctctgataagctgacgggctacgaggttgaagttgttcgtgaagcggcaaaacgattggggctgaaggttgagttcaaggagatgggcattgacgggatgctgacagcggtgaacagcggacaggttgacgcagccgcaaatgacatcgatgtcacgaaggaccgtgaggagaagttcgcattttccactccatataaatattcatacggcacggcaattgtccgaaaagacgatttatcagggattaaaacgcttaaggatttaaaagggaagaaagcggctggcgcggctacaaccgtctacatggaggtcgcgagaaaatacggcgccaaagaagtgatttatgataatgcgacaaatgagcaatatttaaaagatgttgccaacggacgcactgacgtcattttaaacgactattacctgcagacacttgcgctcgcggcattcccggatctcaacattacaattcatcctgacatcaagtacatgccgaacaaacaggcccttgtcatgaaaaaaagcaatgcggcacttcagaaaaaaatgaacgaagcattgaaagagatgagcaaggatggctctttgactaaactgtcgaaacaattcttcaataaagcagatgtatcaaaaaaaattgatgccgacgttcaggacgttgatttgtaatcggacgccatgatcaatagcattcaatgggaatatattttcaacacaaagctggctattgaatcgttcccttatgtcataaaaggcattgggtatacactgctcatctcttttgtaagcatgtttgcgggaactgtgatcggcctgttcatatcactcgccagaatgtctaaccttgctttgttcagatggccggcgaagctctatatctcatttatgcggggcgttccgattttggtgattttgtttatcctttatttcgggtttccttatatcggcattgaattttccgctgtcacggctgctttaatcggctttagcctaaacagcgccgcctacattgcggaaattaaccgttcagccatttcatccgtcgaaaaaggacagtgggaagccgcatcctcgctgggtctttcctattggcagacgatgaggggcatcattttgccgcaatcgatacgtattgcgctgcctccgcttgccaatgtattgctcgacttaatcaaggcgtcctctctcgctgcgatgattacagtgccggaattgctccagcatgcgaaaatcatcgggggcagagagtttgattatatgaccatgtatattctgaccgctctcatttattgggccatctgctccattgccgcggtctttcagaatatccttgagaaaaaatacgctcattatgtttaaacaaacgtttcattaaaaaagccgttccccaggggacggctttttttctattgattcagcttccatttaaacgggtcctcaaacagcgaccagtcggaatcaaattcatattcagtcagcaggcattgatcaagctctttcgtaatcgtttcttcatccaggtcagttccgataaaaactagctgcgttaggcgatcgccgaactccgggtcccactcctccaggatttccggttcctgctgtttgacttgctcctgctcaagcttcggcagcgccgccacccaatatgatacaggctcaatcgtaaccgacggacctgcttgcgacatcagtaaagcaaggttgttatgagatgcgcaccagacgattcctttggcacgaaccacgttctttggcatttgatccaaccaatgataaaaccgtgtagaatgaaacggcaaacgtctcttatacacaaatgaagagataccgtattcttctgtttccggggtgtgttccgcatggcctgccgtcagctcttgaatccagccggccgatccgctcgcttcctcgaagttaaataaccctgtatgcaaaatctcctgcggttttacatttcctttgacggaacgaatgaacctggctcttggctgcagtttacgaagaacgttttcaagctgttcgagctcttgctcgctgaccaaatcacatttatttaagatcagtacatcgcaaaactcaatttgatcgatcaagaggtcggcgatttctctttcatccttttcccccaatgcttctttgcggtccagaaggctttcgcctgactgataatcatgccaaaaacggttggcatcaacaaccgtcaccatcgtatccagctgacagaattttgtaagatcgattcccatctcttcatcgatataagagaaagtctgggccaccgggatcggttcgctgattcctgtcgattcaatgacgatataatcaaaccgtccgtcttttgccagcttctcaacttcaattaataagtcttcgcgaagcgtgcagcaaatgcagccgtttgacatttccacaagcttttcatctgttctggaaaggcccccttcctgcttaaccaagcccgcgtcaatgttcacctcgctcatatcgtttacgataaccgctattttcaagccttcgcgattttgcagaatgctgttcagcaatgttgtttttcccgcacctagataaccgctcagtacggtaaccggaatttttttcataataatgcctccattaaaatagaatgattacgatttaaattgtatactttgccgtatgtacaatggtgtagagcagcttttcgcgctcatttctcactgccgcccgatttctaaatccgtaaaggctccaaccgcgtttaatcctttttccccatcgcaaatccctgcccttgccgacattcggaaaaccgcagcttgcataaagcaattgctccacttgcgttgctgaaccgatggaaagcgcaaatatctcatcagaaagtagcttgggtttcgtttccagttttcaagagacgcttcatggggatcaatgacagcaagatccttagcctttccgcttttcacagatacagccaatgataagccatttatcacaaaacgtaatagttacgatttaaattgtatggtcttttttcctttttgtcaacggttttcaattcagctgatcaccacttttgtatgttcagggatattttcatatacccatttcgcatctggaatggtcagcctgatacatccgtgagatgctttcgttcctagtttttctgcttccgttttgatgactttttgatccttagtcattggcacactatgaaataaaaattcaccgtgatttttccatgatacccagtattctgcgccttcctggtatccttcggagaaaaaccattctccccgttcaggctctacataaaaggtgccctttggcgtagcatcatcttttgtttgatcaagaccagaagaaatcatcattgtatagatggtgttgcttccttccttgatgtaagccttctgctccttcacattcacatcaatccagacatgcttctgtttaatatccgggtattctccgcccgaaggctttgtccaatcaatgcttgtttttgctgtttttcgaacgtccgttatgttttcgaccgttttctttgtattgatacttgcgtgttcttctgcatgatcggagcaggctgacagcaggatgactggcataagaactgcaataatgaataatgagagtttcatattttatccacttccttcgaaaaacacagcttcgcataggcatcgtgaagatggatcgattcttcatttcggcattcaatctcaaaggctgacacccattcaagctcaaacaaatctgcagcaatcagccgggcgagatcctcaacaaatctcgggttttcataggccgtttctgtcacggctttttcatcaggccgcttcaataccggatgcagtctcgcagaagcatttgattctgcggcgtgaagcaaatcagctttaacatcacttggcagcgatgcggccgggtgaatatccgcccaaatgctgaccgttcccctctgattatgggcactgtattcgctgatttccttggagcaagggcacagagtcgttacttttgctgagatgccggcacgctgtttaaacggctgatctttgcgataggtgacagacatgaatatatcagcatgcatcaaacccgctttctcaagcttcgggcttttccgttcgaaaaaccacggaaacctcacttcaactgtggcagatgatgtgtccatgttttctgcaagctctttcgtaaattgctgaagagaggaaaatgagagaatccagccattttgatgatagacttgcagcagctctgttaaccggctcatgttaatccccttctgatttctcggcaaattacaagtcattgtaaagttcgcagccgttgtttgctcggcaggcatcatggcagaagtgattgtgactggatgggacacattagctacacctacatgctgaatgtcaaaaaaataatccttcctgatattttgcaggtccttcattttctctttttccactggtttctcgcctttgatcggactgaccgatccaaagtattgaagacgctccgtttttttcgggagcagcgtatgttgattcattcagaaaactcctctcactaacaaatcgtaataattactatttattttgatcggttcactgttgaaaatcaagagaaaataaaaaagacacgcacaaacgcgtgtccgtcaaaatcctaaacatccgccgggctgctttccgcgctccagcttttccgccagtaatagcctgcggcaagcacaagtgcaaacgccagcagcgcgatacaggaaaacgtgataaaaccgatagcatatgtgcctgtcatctgtttgagagatcctaagatgttcggcaagaaaaaccctccgattcctccggccgcaccgacgattcccgtcaccatgccaatttctttgcgaaaacgctgcggtacgagctggaatactgcgccgtttcccattccgagccccatcattccgacaaacaatagaacaataaccattgaaagagatggcaggctgctgactccggccatacacagtgccacgatgacaaacaatacagaaagaactttcgtgccgccgacacgatccgaaatcaagcccccgacaggccggaaaaagctccccgccgccacacataatgtaacgaagtcccctgcgtgaatttttgacagctggtattgatcaacaaagaaaatagataaaaagcttgagagcccgacaaatccgccaaatgtgacgctgtacagcaggcagaaaaaccatgtttccttttgcccgaacacatgcagatagcttttgagcggctggggagacggctgtgcaggggaatcctttgccatggatacaaaaagaataaagacgatcaataatggaattagcgcaattcccatgacaatgtgccagccgaactgctccgccagacgagggccaaacagggttgcaaacaacgtgccgctgttccccgctccggcaatccccatcgcaagcccctgcaaatgaggcggataccatcggctggccataggcagcgctacagcaaagcttgctcccgccacgccaagcagaatcccgatggcatacagctcagtcagggaacggccgccgaatgtcccccaaagcagcggaatcatcgtcaccagcatcccgatcactgccgtttttttcggtccgattctgtccgttaaaataccaagaatgatacgaaacacagatccagataaaatcggcacagctacgacaagccctttctcaaaaggagacaggccaaaatcctgagaaatataaacacccagcgccccaagcataacccatatcataaaactgacatcaaagtataaaaaggaacagagcaaagtgagtggatgaccgctagttttcagttccgacagcttcataagattcccctttctagaccctcattattttacattttctgaatcaaggatataggaccattattttctggaaaagacatgtgtaagtttttgtgacacgtttaatgcgttaacaatgcattgtgacataatttttaataggagaaaacttacgagcttcgccaaaggaggtctgatacatgaagaaacaaagattagtgttagcgggaaacggcatggccggaatccgctgtattgaagaagtattaaagctgaatcgccacatgtttgagattgtcattttcggaagcgagccgcatcccaattacaatcgcattctcttatcctctgtattgcagggtgaagcgtcactcgatgatattacactgaacagcaaggattggtacgacaagcacgggatcacgctttacacaggcgaaacggttattcagattgatacagatcagcagcaggtcatcacagatcggaaacgcactctgtcgtatgacaaattaatagtggcaacaggctcctcccctcatattctccctatccccggggcagacaaaaaaggtgtctatggatttcggacaatagaagactgccaagcgctgatgaacatggcccagcactttcaaaaggctgcggtaatcggagccggcttattaggactggaagctgcagtaggtttacagcatctcggtatggatgtcagcgtcattcaccactccgccggcattatgcaaaaacagctcgatcaaacagcggcgcggctgctgcaaacagagctggaacaaaaaggcctaacctttcttttggagaaagacaccgtctccatttccggcgccacgaaggcagaccgaatccattttaaagatggctcttcattaaaagcagacttgattgtgatggcggccggcgtcaaaccgaatattgaattggctgtatccgctggaatcaaagtgaaccgcgggatcatcgtgaatgacttcatgcagacaagcgaaccgaatatctacgccgttggtgaatgcgctgagcataacggaacggtgtacggattggtggctccgctttatgagcagggaaaagcgctcgccagtcatatttgcggcgttccatgtgaggaatatcaaggctcagcaccatcagcggcgttaaaaatagctggaatcgatgtgtggtcagcaggaaagatccaagaggatgaacgcacgacgagcatcaaaatctacgacgaacaagcaggcgtttataaaaaagcgctttttgtagatgaaaaactggccggcgttattttattcggagacacccgtgacaagcagcggcttctcgacagcctccttaaacaacgagacatctccattgtcaaaaagcagatcatcgaaccggagacaagcggccctttatttgaatccatgccttccagtgaaacgatttgccaatgcaacacagtgacgaaaggcgcgattgaagaagcggtgcacacgaatagcttaacaactgttgaggaagtcaagcactgcaccaaagccactgggtcctgcggaggatgcaaaccgctcgttgaagaccttttgaggcacatgaccaacagcgaatatacgaagcccgccggcacaccttcgttttgcagctgtactgattttacagaagacgacatcatcgctgagcttcagcgcaggccattcactaatccggcagaagtgatgaaccagcttgactggaaaacaaaaaacggatgcagtacttgtgttcctgcgattcaatactatctggaaatgctgtaccctgggtttgtccagcctgagccagccactgaagagacatgcatcctgatcccgcaaatgtacggcgggcggacaaacgcggagcagctaagaaccatcgccaacatcattgaggcatacagcattcccgacgtatccatcactcacggccaaaggctgaagctttccgggatcaagcctgcggatctcccgaacataaaaaaagacctgaagatgcccgtttacactaatgaacaccgacacgcgctgcaaagcatcaaagcatgtacatgcgggcaaaatcgatcaattcagcagctggcagcccaaatcgaaagacaacttgagatgcttcccttacccgctcccatttctatcagcttatcatgtgaaacagactgcaccgatgccgccctgcaagatgtcggcgcaattcggagacaagctggctgggacattcacatcggcggcgtccggggaactcatgcccgttcaggagctttgttttgcgtgactgagaacgaagacagcactgccggcatgatcaaaggactgatccagtattatcgggaaacggctcattacttagaaggtgttcatcagtggatagaccgtctcgggatcgttcatatcagagaagtgctattcgaagaagacctaagggcacagctgctggaaagcctccaaacagatctgtcactgattcaaaacccgactgtagagacgggtgcatataagaaaggatgaggcattttgactgaacgactgcttagatatttccgtgataaacagcaagacgtccaatcagaaaaaacatatgacactcaatgcccgttttgcagcatgcagtgcaaaatgcagctcgtggaacaaaccatcgtcacgcgcaaaaagtacactgcgattgggattgataatcctacaacacagggtcggctatgcatgaagggcatgaacgcccaccagcatgccctgaactcctcccgcatcacccggccgctgctgaagaaaaacggcgagtttatgcctgtttcctgggaagaagcactgaattacattaaagaccaagtgacaatgatacaagtagaacacggccatgacgctatggcggtatacggaagcgcctcgattacaaatgaagaggcgtatttgttagggaaattcgcacgggtgggcttacagacaaaatacatcgactacaacgggaggctttgtatgtccgccgcagcaaccgcagccaaccaaacattcggcgcggacagaggcttaacgaatcccttatcagacattccccacacccgtgtgatcattctggccggcaccaatatcgcggagtgccagcctacgattatgccatattttgaaaaagcgaaagaaaacggagcttacatcattgccattgatccgcgtgaaacagcgacaacaaaaatcgccgatcttcatttgaaaatcaaacccggcacagacgccgcccttgccaacggtctcgtcaaaatcatcattgacgaacagcttataaacgaggatttcattcaatcacgaacaaatggattcgaagagctgaagcagcatactgactcgttggacctgaatgacatcgccgaacagacgagtgtccccctggcggatataagaaaagcggctgtaaagtttgccaaggaaacgtccggcatgctgtttacagcccgcgggattgaacagcaaaccgatggaacagcggctgtgaaaggcttcttaaacatggtgctgatcacaggaaaaatcggtacaccttactcaggttacggggcgatcaccggacaaggcaacgggcaaggtgcaagagagcatggccaaaaagccgatcagcttccgggctatcgatctattgaaaacgaacaacaccgggcacatgttgcgaaagtgtggggaatccatcaggatgatctgccgcgaaaaggtgtctcagcctatgaaatgatggaaaaaatcaatgacggcgacatcaaaggattgttcctcatgtgctccaatcccgctgtctccagcccaaatgcgaatcttgtgaaaaaggctttacgtaaactgacattctttgttgcaatcgatttgtttatttctgagactgcgaaatacgcagatgtgattttacccgcctcctcttacttagaagatgaaggcaccatgacaaatgtagaaggacgcgtgacattaagagaaacaagccggccatgtcccggcgaagcaaagcatgattggcagatcatttgtgatctcgcatccgctctcggcaagggccgctacttttcttatacgtcagcggaggatatttttgatgaattgagagaagcgagccgaggcgggattgccgattattcaggcatctcatacggcaggctcagacgtgaaggcggcattcattggccgtgtccggaacctgatcatcccggaattggacgcttgtttacagaatcatttgctcatccggatcaaaaagcggcattaagtgtgattccaaacgagccacctgttccaaaagagaagccgacagccgattatccgctttatttaacaacaggcagagtcatgtctcactacttaacaggcgtccaaacaagaaaaagcgccgcccttaccgcgagacattttgaatcgtttatcgaaatccatccgcaaacagcagcaacctacaatatcgaggaccgtgtgctggtaaaaatagaatcgccgcggggaagcatcaccgtccgcagcaaattatcagaacaaatcagaaaagatactgtttttgttcccatccattgggcagacgctcaaaatgtgaatgatttaatcggggaagccttagatccagcctgtaaaatgcccggttttaaggtatgcgccgtccgaatcagacctatttaaatttttcataaaatttttagaacttttcgtatattttgttacattttataacatgtatcttaaatattcctttttgctgtgctacgctggaaaaaacattgataaggagcggatcatctgatgggaaaaaaacagctagttcttgttggtaatggaatggccggggtaagggccattgaagagatactgagtgttgctaaagacgagtttcagatcacaattttcggagccgaaccgcatcccaattacaaccgaatccttttgtcaaaagtgcttcaaggcgatacagatattaaagatattacgttaaacgattgggactggtacgaagaaaacaacattcaattgtatacaaatgaaacagtcatcaaagtggacacggaaaacaaaacagtcatcacagatgcagacagaatccagccttacgacgaattgatcctggcgacaggctcgctcccttttatccttccgattccgggcgcagacaaaaaaggcgtcacagctttccgggacataaaagatacagacacaatgctcaccgcgtcaaaacaatataaaaaagcagccgtcatcggcggaggacttcttggtttggaagccgctcgcggactgctgaatcttggcatggacgtgtccgtcatccacctcgccccattcctgatggagcgccagcttgatgcaacggcaggacgcctgctgcaaaacgagttagaaaaacaaggtatgacctttttacttgaaaagcaaaccgaagaaattgttggtgacgatcgtgtcgaaggcctccgtttcaaggatggcacaagcattgaagctgatttagtggtcatggctgtcggcatccgcccaaatacaacgctcggggccgagagcggcattccggttaaccgcggcatcatcgtcaatgattatatgcagactgaaatcccgcacatttacgcggtcggcgaatgtgccgagcaccgaggaatcgcctacgggcttgtggcgccgctctatgaacaggcaaaagtgctggcgaagcatatttgcggcatcgaaacaaacccgtatgagggctccgttctctccacacagttaaaggtatcgggcgtcgaggttttctctgccggggactttgatgaatcagaggacaaaaaagcgattaaagtcttcgatgagcaggacggcatctataaaaaaattgtcctgagagacaacaaaattgtcggtgctgttttattcggtgacagcagcgaaggcaatcgcctgttttctatgattcaaaaagaagccgatatctctgaaacctctaaaatatcaatcttacagcctctcaaccaagaagcaggcacaagcatcaccgcagcgatgagcgacgatgaaatcatctgcggctgtaacggcgtgtcaaaaggtgcgattattcaagccatacaggaaaagggctgctcgtcaacggacgagatcaaagcatgcactggcgcatcccgctcatgcggaggctgtaagccactcgtagaagaaatcctccagcatacgctcggatcagactttgatgcgtcagcgcaaaaagaagccatttgcggctgcaccacattgtcaagagatgaagtcgtagaagaaatcaaagccaaagggctgtcacatacaagagaagtcatgaatgtgctcggctggaaaacgccagaaggctgttccaaatgccggccggctctgaactactacttaggcatgatcaatccaaccaaatacgaggatgaccggacatcccgctttgttaatgaacgaatgcacgccaatattcaaaaagacggaacatactcagtcgttcctcggatgtacggcggcgtgaccaactccacagatttgcgcaagatcgccgatgtcgttgacaaatatgagatcccgctcgtgaaaatgacaggcggccagcgaattgatcttatcggcgtgaaaaaagaagaccttccgaaggtatgggaagatcttgatatgccgtcgggctacgcatacggaaaaacgctccgcacagtgaaaacatgtgtaggcgagcaattctgccgcttcggcacacaagactccatggcactgggcattgcgcttgagaaaaaattcgaagggctaaacacgccgcacaaagtcaaaatggccgtgtctgcatgcccgcgaaactgtgcggaatccggcattaaggaccttggcgttgtcggcatcgacggaggctgggagctttatgtcggcggaaacggcggaacccacttgcgtgccggcgatttgctgatgaaggtgaaaacaaatgaagaagtcttagaatacgcaggcgcttacctgcaatattacagggaaaccgcaaactatctggagcgtacgtccgcatggcttgagcgcgtcggtttatcccatgtccaatccgtgttaaacgatccggaaaagcggcaggagctgaacgaccgaatgaatgaaacactctctgtccacaaggatccgtggaaagactttttagaggataaacaaacctcgaaagaattatttgaaaatgtcgtgaccacatcataatgacaaaaacaatcattgaggaggaatgggcatggtaaacaaagacgtaacaaaagtatgtatcggaaaaattgaagaattgcctgaacaattaggcaaaacagtgtatattgaagataaggagctcgcggttttcaagctttcagacggaagcatccgcgccatcgaaaaccgctgtccgcataaaggcggcgtcctggcagaaggcatcgtcagcggtcaatatgttttctgcccgatgcacgactggaaaatttccttagaagacggaatcgtccaagaacctgaccacggatgcgtcaaaacatatgaaacgctgatcgaaggagaacatgtttatctcgtatattgatcaaaagaccggatcacttttctagtggtccttcattttttacagtgacggaaggatgacatgatcatgaagaacggaatcgtatatttcgtgggagccggacccggcgacccaggcctgctcaccatcaaaggaaaacaggcgctcgaggaagcagatgtgattttatatgaccggctcgccaacccgaagctgctcgaatttgcatcaccggactgccagtttatttattgcggaaaactgccaaaccgccattttatgaaacaaaaagaaattaacgccctgctagttgaaaaagcattaaatgggttaaccgtcgttcgcttgaagggcggagatccgagcgtattcggcagagtcggcgaggaagcagatgctcttcatgagcacggcattcgctatgaaatggtgccgggaatcacctctggaattgcagcgccgctatatgcgggcatccccgtcacgcatcgggatttcgcatcgtcttttgccatgattacagcgcatgataaatcattaaaaggcacgccgaaccttgactgggaagggcttgcacgaagcgtacaaacccttgttttttacatgggtgtcaagaacttgtcttatatttgccagcagcttatttcatacgggaaatcaccttctgtccctgtcattgtcatccaatggggaacgtggggccgccagcggagtgtgaaaggaacgcttgagaacatccagcaaaaagtgcaggaacaccagattacaaaccctgcgattatcgtcatcggagacatcgtcaactttcaaacacacagctggtttgaaagcaaaccgctcatcggacggcatttgatggttgtgactcatggcgaagatgaagacccgcttgcagacaagctgcgcgatttcggcgccgatgtcatcgagtggccgaaatggcggaccgaaaacatgcctgtcaatgaagacattcttcgaaagattggcacctttgaagacgtttttttcacatcgcgccgggcggtttgtgaatttttcagagcactggcttctcagaaaatcgacatccgccagctgacagcgaaactgagtgcagcatctgaacaagcaaagacggagcttgaaaaacgggggtttcttgtcaccgccattcagcctgattcagagaaacgtcttgttgtcgggagccgccatgcagtggaaaacatgcaaaagcatgaatcctgttcgttttatatcactcatgaaaacgtcatagatgaccggttcacccacatgattcagcgtaccatcagtgaatccccgctgcacatggtcatttgcccgaacaagctgtccgttcagcaattgatcaatggtggcgaacaaattggcattttgccggaaccgtcagcaagccggccccctatcgtctgtataggcgatgactcagctgccgaagcttatggattcacagctgtacaagaacaggatgaattgctagctttcattcagaatcaacagacgcagaaaaagctccttcacagctgatggcaaacagccctttcccccaagggctgttttatttatgtaccaattttttatgatgggtggaatacatcgccatattctcagccttaggatccaaataagccttagcgctgttaactgctgtcgggccttcggtaaagccgccggcaattaatctcagcttgctttcataaaaagccgcgtcgcccgccacaaacacgcccggaagattcgttcgcatatgtctgtcagctttcaccctgccttcttcaatctccagcccccactccatcatcggcccgagatcaattttgaacccatgattgatgatcagctcatcaatttctatgtcttccctctggctagactcagtatgacaaacggtcacgcttttgatgcgctcttcatctccgttcaactgctccagccgataaggagtaagcacccgcaccgatgattgcttcattttcgtcacgctgctttccattccgccgaattcctcgcggcgatgaacgacagtcacagacgccgcaatcggttcaagttcattagcccaatcgaccgcagtatctccgccgcctgatatcaccacgcgcttatctttaaacgcatcgagcttctccactccgtaatgaagatttttgcccgcatatcgggccgcatcctcgctgtcaaactcattgacctcaagtgtacccatgccgcaagccaaaatcacagttcttgtatagtgcttttcgccttcagaacccatcagaacaatggtgccgtcatctaggcgttcaaacccggtcacacgctgattcaatacgatatcaggatcaaacgttgccgcctgctccttcagctgctcgatcagctgctttcccgcaatccccggtatgccgccgatatcgcgaatgattttctcaggaaagaataaagacaccttccctccgagcttcggcaaaaattcgattacctttgttttcagctcccgcatcccgcagtaaaaagcagtaaacagcccaatcggccccccgcctataatcgtaacgtcatatacctcttgattctcagccatccgtcctgcctcccgttcacatctatatcaaagttttaattgagaatgaatatcaatacaaagtatatcatattcaagggcctttgtttattcatttcttctccttgtggtcaattgctgaaaactctataataggcaaaaaccaattgggtgaaacagatgaaaagacgagtcgaaacgatcaccttcgatggcagtacactagaatattctgtgacaggcaagggaactccgatccttgtcatgcatggcgggcattcaaattgttacgaggaattcggatacacagcgttgattgagcaagggtattccatcattacgccttcaaggcccggctatggacgaacgtcaaaagaaattggaaaaagtcttgccaacgcctgccgtttctatgtgaaattattagatcatttacaaatcgacagtgtccatgtgatcgccatctcagcaggagggccgagcggcatatgctttgcctcacattatccggaaagagtaaatacattgaccctgcaatccgcggtcaccaaagagtggctcaccccaaaagacactgaatataaattggggagaattctcttccgcccgccggtggaaaagtggatatggaagctgatttcttctttgaataacgctttcccgggtttgatgtttcgagctatgagcccccaattcagcacgcttccgtttcagcgaatcaagtccttgatggatgaaaaagacatagaagcatttcggaaaatgaacagccggcagcgctcgggtgaaggatttctgcttgacttgtcacaaaccgccgctgtaactttaaaagacctgcaagccatcttatgtcccgtgctgattatgcaaagtgtttatgatggattagttggcttgtcacatgcacatcatgcaaaagagcacattcgtggcgctgttctctgtttgcttcactcatggggacacctgatttggctcggaaaagaagctgcagaaacagacagtatcctactcggttttttggaatcctaaccaaagtgaaacgatcctttcccttcctccgtcaaacaagcagtgcctttttttctggtatcataagaaaggcagcttaacatgagcggaggttttattgtgacagcacaatcatcttttcttcagctgaattctatttttatcagcattttaatagaagccattccgtttattctgattggcgtcatactttccggaatcattcaaatgtttgtttctgaagaaatgattgcaagaatcatgccgaaaaaccgttttctcgccgttttattcggtgcgctggccggcgttttatttcccgcctgcgaatgcggcatcatcccgattacgaggcggcttctgttaaagggagttcctctgcatgcgggcgttgctttcatgctgaccgcgcctatcattaatcctatcgttttattttctacttatattgcgttcgggaatagatggagcgtggtcttttacagaggcggactggctctcgccgtttcgctgatcatcggggtcatcttatcctatcaatttaaggataaccagcttttaaagcctgatgaacccgggcaccaccatcatcatcacggcaccttgctccaaaaactgggcgggaccttgcggcatgccattgatgaatttttctccgtggggaaatatttaatcatcggcgcctttatcgcagccgctatgcagacgtatgtcaaaacatccactctgcttgcgatcgggcagaatgatgtatcctcttccctcgtgatgatgggtctggcgtttgtcctgtcgctttgttcagaagttgatgcgttcatcgcgtcttccttcagcagcacgttttcattaggatcgttaatcgcctttctcgtctttggtgcaatggtggatattaagaatctattgatgatgcttgcggccttcaaaaaacgatttgttttcctgctgattacatacattgtcgtgattgttttagcgggatcactactggtaaaggggtgattggatgtttcgtttattggtgctgatgggatttacgtttttcttttatcatctgcatgcctcaggaaatctaacaaaatatatcaatatgaaatatgcctatctttcctttattgcgatcttcctgctggccattctgaccgccgtccaagcatatctatttatcaagtcgcctgaaaaaagcggacatcaccatgaccatgattgcgggtgcggccatgatcacgagcatgaccatgaacaaaacaagccattttatcagcgttatttgatttatgttgtttttctttttcctttggtgtcaggcatcttcttcccgattgcaacgcttgactcatccatagtcaaaacaaaagggttctcgtttaaggcgatggagagcggagatcactactcccaaacacagtatttgcggcctgatgccagcctttattacgcgcaagacagctatgacaaacaaatgaaacagctgtttaataagtattccagcaaaaaagagatttctctgaccgatgacgatttcctaaaaggaatggaaaccatctataactatccgggtgaatttctcggacggacgatagaatttcatggatttgcttacaaaggaaacgcaattaacaaaaatcagctgttcgtattaaggtttggcatcattcactgtatcgctgattccggcgtgtacgggatgcttgtggaatttccgaaggacatggacatcaaggatgatgaatggattcacattaagggcactctggcctcagaatattaccagccattcaagtcaactctccctgtcgtcaaagtaactgactggaataccattaaaaaacctgatgatccgtatgtttacagaggattttaagtgaagacgaaaccagtacaagtactggtttcttttttatttctttttcatcagcatcaaatcgagatagagctggcaccgcgttctgaaatcgcttaaatcgatcgacgtcatctcagtaatctgtttgatgcggtaattcaatgtattttggtgaataaacagctgttctgccgctggttttgttttgcagttgttgaggagatagatttccaaggttttgagcagctcagtgctgctttcttcgtcttttgcttttaataaagctaaatctttattctcgtattctaaaaattcatttttctgttcgatgctttctaaatagcggtaaatgccgagtttggcatattcatatggaatgttttcctgattgccggtgatttctgcggctttgatgacttcaagtgcttctgtgtagctcttgccaagttttaataggtgattatattcgtttccgataccgatataaataggggtaggtattttttgaaagtgaaaatgtgttaacagcttgttaataaactcagaagctgctgaggagacggagcttttttgggaaaaactcgctacgacgatgacaatgtttgattcgatcgttaagacatgactgaccttatcccgtaaattcaggtacgacctgatattttcctttaaatcctcaaccgcttccccatccccatttgcggcgtgcaggataacaactgaaaacatggaaggcagcacggtgttgatcctttcagcttcccgtctgagttccttctcagaggtaaattgctgatagatcgcccgtttgatgagatcctctgctttttcttccttttcctgtttcaatttattcgttttataaatgattttcccgacatggaaggaggtctcgtacaaaaagtcgagctcttcatccgtcagattttggtccagctcctgaatccagatgtagcccatgacttcccctttgtgctttgcactcacgaccaccctctggtttaacccaatgctttcaattttattgacgcgaaaaggctcaggctctgttttcaatttttcaataattccgtccttcagaaacctctcaaaaatctggaccggacactttttcgaaaaaatagtctgctggttggcagaatcaaaatggttaatatagtaagaattataggctaacaaaaagaaatccgcgctttccagtatcactggcttttgcagttcatagctaataaaatcaattagcttatcaacatctgaaaatgaaaaaactctctctaaaagctcttccatacctttttctcctatactttttttactttaatcatatccatacggggtctttttgtatagaaaaaaatacgtttgtttccaaaagaaaaaaatggccgcttaaaaggagaaaagaggaaaaagggacagccccttcctcctcctttcgatctttattgcgacattgtatcttggtagtcgttgaactggtctgtgacagcttgtgacggagcctgcgtcaatatgctgacaaaaaagacagataatagactcgcagcaaaaccaggtatcatttcatacagaaagtccgaaagaccggcattcgcccaaatgattacagtcgctgctcccacaatcatgccggcgagtgccccccatttggtcattcgtttccaaaacagactgagcagtacaactggcccgaatgatgcaccgaagcccgcccacgcgtagctgaccaatccaaggatggtgttatttttctcccaagccagaaccaacgcgacaattgaaacagccagaacagccagtcggcctaaaaacaccagttctttatctgaagctgagcgtctgaacatcgacttatacaaatcttctaccagagagcttgatgtcacaagcagctgggaagaaattgtactcataatcgcggccaaaatcgctgaaatcagaaaacccgtgataatcggatggaacaagatattccctaattgaataaaaatcgtctctgggtccttcagtgtcatgccgcgctgatggtaataagcgattccgcccaaaccggtcagcactgcgcctactgcagacaaaatcatccagcccatcccaattctgcgcgctcttttgatctctttgacagacgttatcgccataaaacgcacaataatatgcggctggccaaagtatcccagcccccaggcaaacaaagaaataatgccaaggacgctcgttcctttgaaaatattaaacatatcaggatctacagagcggatttcagcaactgtatcacctgctcctcccgtgtggaaaaacgtaacgatcggcacaagaatgagtgcggcaaacataataatcccctgaacaaaatctgtccagctgactgccaaaaagccgccaaacagggtatatgccacaacaacacccgtcacaatccacaggccggtgtgataatccatccccaagatgctgttgaataagacgccgccggacaccattccggacgatacataaaacgtgaaaaagactaaaatgacaattcccgaaaacagtctgagaagctttgtttgatctccgaagcgattttccaggaatccgggaattgtaatagaattccccgctttttcagtataggttctcagccgtggtgcgacgtaaagccagttcgcccacgctccaaggcaaagtccgatgacgatccaagcgccgctcagaccagtagaaaacatggcgcccggaagccccattagcagccagccgctcatatcggcagcgccggcactgagagcggttactgccggacccaaagagcgtcctcccagcatataatccgtcagattcgacgtacgcttgtaagcaaagtagccgattagcagcattcccgccatataaatacaaatcgaaataatcagctgtgtgttttctatggcacttcctcctcttttttatagtatatggatgaaatggacacccccgcagggaggatgcccatttagtcccgcttagaacatttcactgattgtttttgcttgcatatgcagagccaagtaatccggcccgcctgcttttgaatccgttcccgacattttgaagccgccaaacggatggtagccgacgatagcacctgtacagttgcggttgaagtataggtttccgacatggaattcctgtttcgcacgctcgatgtgcttgcggttgtttgtgataaccgcgcctgtcaaaccatattcagtattgtttgccacttctaaagcttcatcaaagtctgacactttacaaaatgcaacgacaggtccgaaaatttcttcctgcatgagtcttgctttcggatcaaggtcagcgaagatcgtcggtttgatgaagtatcctttcgaatcatcaccagtaccgccgcttactaaacgcccttcctgttttccgatctcaatatagctcataattttatcataagaaccttggtcaatgacaggtcccatataaacatctgcactgtcaggtttagctgttacttttgattccgtaatttcaatgacacgctctaatacttgatcatacactttttcatgaactactgcacgtgaacctgcagagcatttttgtcccgcaaagccgaatgctgaagtaaagatcgattgagccgctaattcaatgtccgcatcctcatcaacaacaaccgtatctttaccgcccatttcagcgatgacacgctttaaatgctgctggcccggctgaaccttcgccgcgcgttcgaaaattctcgtaccaacttctcttgatcccgtaaatgtgataaggcttgttttcggatggtcaacaagatagtcgcctacttccgctccgcttcccggaacaaagttgactacgccttttggcaatccggactcttcaagcacctcaacaaattttgctgcaataacaggtgtagcactcgcaggtttcagaaccactgtgtttccagtaacgatcggcgccactgttgtgcctgccatgatcgcaaacaagaagttccaaggcgggataacgactgtcactccagtcggcgtgtatacatattggtttttctcgccttcacggctgttgaccggtttgccttttgccagttcgatcatttggcgtgcataatactccatgaagtcaatcgcttcagccgtatcggcatccgcctcgttccaaggctttcctgcttctttcacaagcaaagctgagaattcatgttttcttctgcggactttggcagcagcgcggaacaggacagccgctctctcttcaggagacgtgtatctccactcttcaaatgcttttgcagccgcttgaatcgcttgctcagcgtgctcttgagacgcttttgacactcggccgacgacttcttctttatcagctgggttgattgaaacgattatcgcttccgtttccactctctcgccgttaatgacaagcggatagtcttttcctaaatattcgcttactgtcgcaagcgcttttttaaacgcttccacgttgttttgatcttggaaatttgtgaatggctcgtgtttgtaaggtgttgtcatgataatctctccttttttacttctttgtcattcctttgaaagcaaatgcaatgtttgacggacgttctgcaaggcgtctcataaagtagccgtaccaatcctcgccgtatggcaggtagactctcatgttataaccttcttttacgaggctgagctgggtttgcgaccgcatgccgtacagcatctgaaattcaaacttgtcattggcaatgccatgttccttggcaagctgctttgtaaagtcgatcattttgtcgtcatgtgtggcaatcgctgtatagtgaccgtttaagagctgctttcggatgatttttttgtaattttcatcgacatcgcttttctccgggaaagctactttttctgattctttataagctccttttacaaggcgaaggaacgggtttaaagaatccaaatcgtcaatgtctttttccgtccggtacagataggcttgcagcactgtgctcacatgctcgtatttctttctgaaatctttgaaaatatcaagcgttttctggcatctgacttcgtcctccatgtcaatggtgaccatgattttatgtttctcggccgtctgaaggatttttgtcatattttcatacaccaaatccatatctatatccaaacctaaagacgtcatttttaaagaaacgtgtgagttcagctcctgatccgcgatggtcgcaatggtttgaatgcactcttccgtacgctcccgtgcgacctcggcgctgttcacaaactcgcctaaatgatcgacagtaactgacaagccttggctgttaagctgtcgaatggtcgggattgaactgttaaagtcattcccgccgataattttacccgctgctacccgacttccccagttcctcgccattttattgagaaagccgcttttggataaaaataagaaaaaatctcttgtgatcacttccaacctcaacaccccgcaatctaagaagtatttgtatgagtttattgtaaatggacaaaaccagcgttcacaatattctcaaaatacaaagattctgattatttttgtgggtttgccacaatcagatagttagaaagtcggggggggattctgtcgaataaaggagaaaaggaagcgacaaaaaacatcagcttcctccatccttccacacttcttcaaccgtattcaaaagcaaacggttcaattcagatgtcatatcttttttctctgccttcagttcttttgccgcttccatgattctttcgatttccgtttcaatgaattggtgaataacatcgattcttgcttcgaggtcaagctcttcccctcttcttttccgttcaagcaaggtttccatttcagccttcagctcgggttcagcaacaagttcattcatcaaaacagtaaagtccattggcggtatggttccgtgcttttcaatccattggcaggccaaaataggccgaagaacgtagaagtactttttaattttgacctcttgtccttgtagataatccttgacgttccttctcgccatattgatatagtgatacacgcttgcttcaggcttaaatgcctccgtgcggagttttcttaactgctctgcggtcgtaaatgcttcataatacacaatgtctgaggacagccattcgagtagcggagggtttgactttttgaaaagccgaagcgtttttctcagctcccagccgctgatatccagcaaatcgtgaatcggttcctcaatgacatcacgctcctgctcaattgaaaagtaccactcctttttcggaacataaataaagcggacgtcgtaatcactatcctgcgagggaaatccccatgcgcggcttcctgactcgacggcatacacgattttgactccgtatgactgctcgatccgttttaattcatcaatgattctttgtttcatatctattcgtctccagtctgttctcattccggcagtttgcagaaaaaaaccgcctgatgatatgcggcggcttttcacatttatcagcctttaagatgctgcttaaagaaagcaagtttttcagtttgaaaagcagggatatactcatgtccgaagtagcggtacaccttcagctctttctttgtttccaaatgattgtaggcggcaaacacggtggacggcggcgtgaccttgtcaatcaggccgattgacatcaggacaggcaccttcactcggtcagcgagattcataatatcgaaatatgaaagtgtcttcatcgcctgcacttctgtttccgggctgccatttcttctgaagaaggaattgatttcaaggtacggctgttcaagcgccacatcaatggcccgttcgaagttgcttaaataaggataatcggcaaccgcggcttttggaatgtctgacagcgctgctgcggcaatggttaaacctccgccttggcttcctcctgtcacaccgatccttgtttcgtcaacctcgtcgaagctgctgatgacctcaagcgcgcggacggcgtccaaataaacaccgcggtaatagtatgtatctttatcaagaattcctttcgtcatccagcccaaagcgtgaccgtgcggtgaaatactcgtatcctcgctgctctgctggccgcggacaagcatgccgaatgtggcgtagccatggagtgcccagtttaccatttcatgaatctcaccatcatagcttgcattgtagccatgatatttcacgatcgccggatgcgggccttccttgtcaggcaccgcgtaccatccggtaatgcgggcgtttccgaagcttttatatgtgagacggtacacttttactccgtcagcaggatagtcaaccggctgtaaatcaggttctgcttggacttttgcaagttcctccaaagacaatttccaaaactcagaaaaatctttcggtgctgttttttcaggcttatatgtttgcaattggtcgagcggcagatcgaatagttgcatttccgattattcccctttgttttataagatttagtttgtattcctatactaccacgtttcgtctttgttttctaaatattttcatctttgtttcccagacagccttcatcaaacgtttgtttaagactttcccggcttagttccataaaggcctgggccgtcagactgacatagcggttctttaaaaagacaaagacgagggttcgtgatggcgcggattgaatcgataaatagatcacacccggatctttatcccttctgaccatattcggtgccattgtcacacctaatccgttagccacaagagattgggcggtttcaatatggctcgtcttaaaggcagcattcggcttaaagccgctttccgcacagagatcgagaactgtcctgcgaaagccgaagccttcttttaacagaataaagggcacgttccttaccatgtcaatcggcacacacggctggcgtccctcatcttcttccagcgctttctcaatcagcgcgaccaattccggcggcatccacctttgtttttccttcggcaccgcgagaacaaccggttccgtgagcaagggtgtaatggagagccgttcatcctcgatgggcaaggataaaacagaaaggtcaacttctccctttgccgtcatcttctctaatgaaaccggatctttttcaacaagctgaacctccacatgaggatagcgcgccaaaaactgcttcagcagcggaggaaagagatatctccctgttacagcaggaatcccgatggataatttatgaccgattccctgtgatcgctcctgcatttcccgaagcaaatcatctctggaacgaatgatgtcctcggctttttcaatgaaacgcctgccgtgaggtgtcagtgtaacagagccatgggatctgtgaaaaagggtaagccccagctcagcctcaagctttttgatttgctggctgagagacggctgtgcgatatgaagatgttccgccgcctttgtaaagctttggcgccgggcaatttccgctgcatattccatcactttaatatccatttcagcctccataggttgaacctatcattttcatcatttttatatcttggacgaatcataacagaaattgctaacataatccatatcatcatttacgaaaagaaggagctggttcaaatgacaaatgaaacaccgttttctaaaaacgccgagatgtatcgggatgaaaaggtatttgccgagggggaagatttggggttgatgatcaaaacagcggaatgccgggcagagcatcgagtgctggatataggagcgggcgccggccatacggcgctggcattttctccttatgtacaggagtgcatcggtgttgatgcaacgaaagagatggttgaggttgcgtcctccttcgcgcaagaaaaaggagttgaaaacgtacgctttcagcaaggaacggcagagtcactccccttccccgacgattcatttgacatcatcacctgccgatacgcagcccaccatttttcagatgtccgcaaagctgtcagagaggttgcacgcgtactaaaacaggacggacgttttctcttagttgatcattacgcgcctgaagatcccgttcttgatgagtttgtcaatcatttgaaccggcttcgagacccttcccatgttcgtgaaagctcattatcagaatggcaggcgatgttcagcgccaatcaactggcctatcaagacatccaaaagtggaacttgccgattcaatacgatagctggatcaaacgaggcggaacccccgctgaccgagaaaaacaaatcattacccacttgaatcacgcatcagacgaagcacgcgacacgttctgtattacattgaaccaaaacggacagcccatctccttttgtttaaaagcgattttgatacaagggataaaacgataaaaaaagccgtgcgctgcgcacggctttttacatcggctgataaagatcccagccaatttttaatgtctcaacaatgtaatcggcaacctcttccggggaaaggttgtctgttgccacttttgaattgtgcttgtcataaatgacttttctttcgttaaacagctgttccatttcatccattgaacggttatgcagtacagggcggctttcgatcaataaatccgcgcgctgcttccagttctcccatgacaggtccagatgaagcacgagacagttttccagacagcaatttctgatttcttcttgtttaaaagatcccccgcccagagatacgattttgaatcgtttatgatggcagatgtctaaaatatattccttctccgttttccggaaaaagtcttctccctttttctcaaatatctcaggaattgacatattgaaatccttttcgatctgctggtcaatatcaataaaatctctatataattttttagcgaccaattggccgattgttgtttttcctacacccatgaatccgatcaggacgatatttctttctcttactgggatggctcgtttagcgttcatcttcggcgaaatcctcctaaggaatgaaattatatattcattatatgcttatttagcgaatatttatatagataccggctttaccggtcaagcttatagtgcgctttgttgtagccatttttgcctgaatgacattcattgtacaacatttctgcaggtattttaatacttcgacgcaaaaaagcgttaaaaccttccgcctttattgtttttccagctgactcttcgatggaagggtctttttctgtatgataaataggaagggagaaatggcgatgatcatttggataaacggggcattcggttcgggaaaaacacaaacagccttcgaactgcacagaaggctgagcccatcttacgtgtatgatcccgagaaaatgggttttgcgctgcgctccatggtgccgcaggagatcgcaaaggacgattttcaaagctatcctttatggcgggcgttcaattacagtttgctagcttctctgacagatacataccgcggcatccttattgtgcctatgacgattgtacaccctgaatacttcaatgagatcatcggcaggctcagacaggaaggcaggatcgttcaccactttacactaatggcttcaaaggaaaccttgttaaaaaggctgcgcaccagagcagaaggaaaaaactcatgggccgccaaacaaattgaccgctgtgttgaaggattatcatcacccatttttgaggaccacattcaaacagacaacctgtcgattcaggatgtggcagagaacattgccgcgagagccgaactcccattagatcctgatacaagaggcagcctccgaaggttcgccgacagattaatggtaaagctgaatcatatccgcatcaaataaagcttctgtacacgacaaaagcccgctccgagagcgggctttcttcaacttatttccaccagtcatcaaacatagacgccggaacctggcgtttatgttcagtcatgctgtagcgtttttccagcgcttctgatactttcgctgatacttcttttccttcgagataatcgtcaatctcgtcgtaggaaatgccaagctctgtttcatccgactgctgcggtttttcgtcgagcagatcggcagtcggctcttttaagtataagcgttccggtgcacccagctctttcagcagggttcttccctggcgcttcgtcaagcctgtcagcggcaggaggtctgctccgccgtcaccgtacttcgtaaagaaaccagtcactgcttcagcagcatggtctgttcctaacacaagaaggccttcctggccgccgatcgcgtattgcgcgatcattcttgttcttgcttttacgtttcctttattaaagtcagtcagctgatcgcctgtttcctgctgatactgatcagaaaaagcgctgactgttgatttaatatcaaacttccatgatttatccggcttaataaacttcaaagcaagctgggcatcgtcttcatcctgctgtgtgccatgcggaagacggacagcgataaattgagcgtctccgccctcctcgcgaatgctctccaccgcaagctgagcgagtcttcccgcaagtgttgaatcctggccgccgctgattcccaatacaaagcctttagcaccagttttctttacatattgttttaaaaaattgactcggtcctcaatttcttgctttggatcaattgagggcttcacatgtaactcacgcataatcttttcctgcatgctcatcccaatcattcctcctgtacattttcccttgttactgatcatttccccaaatcaatgaaaatgaatcatgactgttatgtatccctattaaatatagcacaggtcttcattcacagtgaacaagagagatcagctgacttcaacccgtatggatgtcacactgtcgccattgcatttccctttttcaatcgggcaggaagaaaacgcgacaattaaatccatctccgccctgagccttacataatctccggcattcgaaagcggcgtttccacagacagattccctttctcatcaaggacagtattcataaaaatcgcaaatgggtaatgcatgtgaggcttcggtacgccaaactgctcaagcgcacggttcatattgtcatagcacgtatcctgaaactcatccttttgcttcccatataagagcctgttcatatcaggacggcaggcgggcagcagcagatcatgcttgccgaccgtatcttcaatcagggttaacatcggcttatacaggttggagtagagatggtcgttgaccttcacatgaatggagtgattggcgtctatcgtcgctccctgatcaaggtgttcataaaaatccttggcatggtatgcgacaaaatcagccacctgctgcccttctacatcaaccacctttaaaatctgcccctttttcagcttcagccccagcccttttttcggctccacaatatattgctgtgtcattggtttgctccttttttcattagtatgagcgtccgcttccttctccatgtaaaaagaggcaaaaatccgatgtatataagcttcggacagatcacaatctaaccttagataaaaggggttgaataaataatgagccaaacaaaaaaagaccagccaaaagggaatctggcttggtggcagctgtcactgatcggagtcggctgcacgattggaacaggcttctttctcggttccagcatcgcaattgtaaaaagcggtttttccgttctcctttcatttctgatcgcagggatcggtacgtattttgtctttgaacagctcgccaagctatcggcgaagcagccggaaaaaggttcgttttgtgcgtatgcccgaaaagcattcggcaaatgggcaggcttcagcaacggctgggtgtactggtcatcagaaatgctgattaccggaagccagctgacagccatttcgctctttacgaagcattggtttcctcaagtgccgctatgggtgtttgcctcaatctacgcagtactggggctccttattattttcaccggcctgtccgtctttgaaaaaacagaaaacgtgctggcagtgattaaaacagctgctatttttatgtttattgtcattgccatcctggctttatgcgggatcctgtccggcggaaatcatggcatacatgttccaaataagacgagtgagtttttcccatacggcgccatggggctgtggacaggtttaatctacgcgttttacgcttttggcggaattgaggtcatggggctgatggcggttcacttaaaaaaacctgaggaagcgtctaaatcagggaaactgatgctggcgacgctggcgattatttatatcatttcaatcgggcttgctctgcttttggttccgttacacacgtttactgaacaggacagtccgttcattacgtcattaaaaggatataaccttgagatcatccttgatatatttaacgggattttcatcatcgcagggttctcgacccttgtcgcttcgctatttgcggttacgacattgctttgtacaatggctgatgacggcgacgcgccgaaatgctttactctaaaggaaggcaaaaaaatatgctggccggcacttgggctgacgtttgcggggcttgtcctctccattattctgtcgttagtgctgcctaaaaacatttatgagcatatgacaacagctgcggggcttatgcttttatacacttggctgtttatcctgttctccagcaaaaagctgactgatcccgagggcatgggaaaaacgcaaatttatttagcgatggttctgattgctgcggctgtgtccggtacattgtttgaaaaatcaagccggcccggttttttcgtcagcataggttttctcgtgatcatcgccatcgtgaccatgatctatcaaaaaaagcagggtcataaagatcgccctgccagtccttgatttatttcattctgttgaacatgttctttaaataagaaaacgggcacttcgatacctgtttttcgtcatcacggaggaaatactgcttccattcacgattattctttcctccgtatcagcctgctcatgttacggccaaatgcagttgatccatttaggtcctcaaacacccaccttggctgaaacgtgatcataaaaaaaggaaagcttcggctttttctcgcctcgtgcgccggtgtagcgcagagaagaaagtacggctcgccgtcaaaacaaaactcccatttataatgctcgggatcggccggaatgtcttccggccattctttttcgtcttgatgactcagtctatttaaaaagcgccaaaacagctcttcatacgcttcaatcgaataatgctccgccaaatcttccggtgtatcaaacaacacaacgagggatgcgtattttcccgtgtcccgcgatatcttgccgtactccgcaagcaacggagccagttcctccgctgtgcggttttcccgcggatctccggcaaaagcaatccgaagctgatcagtcagaaacgcctggcgtccgggaatgcacggaaacgtatccgcgtcgtcccccagagtttctgccagcagctcaaaagcgattctttgccattcaggaagctcttcctgaatacgttccagaaaacttttggtgtaaatcccattcaccattgatccacctccagtatcatctggatactatattaaaactggaagcggcaggtgactgtccttcatgaatcagcccaataactgtttgatgccctgataaccaaagtaaaagccaaacacaaggagggatacaccggcgattccggtcaatcctctcaatagcttttcatgaagcaggtttctgaacgtactggctgtgatagccatgcagaaatcccagattaaaatgccgatcatgatgccggagctatagattagaagctgattcatattgtaggcctctgctgttttcgcaagaatgcttccgtaaattccaagccaaaaaaggatgctcaatgggtttgacaatgaaatgagaaaacccgatgcgaatgttttcctgtatgacggtttcccccgtgagcttcgcacatccatcggttctctgacgtttttcagcgtttcaattccggtataggtcaggacaaaaaagccgaagagccacaaaaacgttttcacaaatggagcggtcaagaactgcgacagcccgaaatagataaaaagcatgtacagcccatccgctgtcatggcgcctaaaccgaaaatccatgcatgccaaaaaccgtttttaattcctttgtctatttgcgccgcattcactggccccacaggcgcagacaaggacagtcccagcacaatatagctcaaaaaaatgttcaccggcccgtactcccttctcttatgtaacttgtacaatttattcgggaacgggccaagctatgcacaaattcacttactgtttcagacgttcaagctcttcctccataatatcggcggctttgcctacaaaactgaaaatgagttccagctcctcttccgtatattcgcggcacaaatccatcgttgactcagacagaggacggaacaaatcctttatatgttttttcgaagcagtcaaagggacgattacgactctcctgcgatcgttcgggtccttttcacgagccacataccccgctttttccagccggtcaacaagcgccgtgactgaccccgtgctgaggccggttttttttcccagttctccggccgtcatcggccctgcttcatttaaaatgtcagctgatttcaaatcggtgggaaacagaccgagagcttgagcggctgcctgatgaaacagaaccgttcttgtgcccagttttcgaaaaagctgaacagcagtcttttccaactcacttctggaatttcttgttgacaactgacagtcctccctataaaatcgagtttatcttgataatcgagatattcaacaatcaaactattatcatgatatcagaacttacatagaaaagtaagaggaggtagaacaaatggacacaacaacagcaaaacaggcttccaccaaatttgtggtcctcggtctcctgctgggcatcttgatgtctgcaatggacaatacgattgttgccaccgcgatgggcaatatcgtagccgatcttggaagcttcgataaatttgcatgggtgacggcatcctatatggtggcggttatggctggcatgccgatttacggcaagctttccgatatgtacggccgaaaacgttttttcctgtttggacttatttttttcttaatcggttctgctttatgcgggattgcccagacgatgaatcagctgatcatcttccgggccattcaagggatcggaggcggcgcgctcctaccgattgcctttaccattatctttgatttgtttccgccggaaaaacgcggaaaaatgtccggcatgttcggtgctgtatttggattatccagtgttcttggtccgctcttaggcgcgatcattacagattcgatcagctggcactgggtgttttacatcaatgtgccgatcggcgcattgtcattgtttttcattattcgctactacaaagaatctctggagcacagaaagcagaaaatagactggggcggcgcgattaccttagtcgtatccattgtatgcctgatgttcgcccttgagcttggcggcaaaacatacgattggaattccattcagatcatcgggctgtttattgtattcgccgttttcttcattgccttttttattgtggagagaaaagcagaagagccgattatttctttctggatgtttaagaaccgcttgtttgccacagcacagattctcgctttcctgtatggcggaacatttattattttagcggtatttattccgattttcgttcaggcggtctacggcagctcggcgacaagcgcgggcttcattctgacgccgatgatgattggatcagtcatcggaagcatgatcggcgggatcttccaaacgaaggcaagcttccgcaatttgatgctgatatctgttatagctttctttatcggcatgctgcttctttccaatatgacgcctgacacagcacgggtatggctgacagtctttatgatgatttcaggctttggtgtaggctttaacttctccctgctgccggcggcatcgatgaatgatcttgaacctcgctttcggggaacggcaaactctacaaattcatttttgcgatcatttggcatgaccttaggcgtcaccattttcggaacggtgcaaacaaacgtattcacgaacaagctgaccgacgccttcagcgggatgaaaggctcagcgggatcaggtgctgcgcaaaatattggcgacccgcaggagatattccaagcgggaacacgttcccagattcctgatgcgatcctgaatcgcattattgacgcgatgtcatcaagtattacgtatgtgtttttgctcgctttgattccaattgtcctcgcggcggttaccattttatttatggggaaagccagagtgaaaacaacagccgaaatgacaaagaaagcaaattaacataaaaaagcagtacatgctgggcatgtactgcttttttctattacactccaaatcttgcaagaataaacgtccatatacaaataatcactaacagaatcaggctgtacgccactgtctttttaaacagtttagattccttgcctgtttggccgaccgctgcggcagcgatggcgatagattgaggagaaacaagtttcgccatgacaccgcccgccgtatttgcggctaacagcaagtctgaacccgcaccgatctgcgctccggtgacaacctgcaaatgaccgaacaaagcattattgctgacaacagaaccagtaatgaacacgccaatccagccaagaacaggactgacaaacgggaacaggtctcctgttttcgccaatgctaatccaattgaagagctgagccctgcgaagttggccagattggcaaaccccatcacgaagcagatcgtcataatcggcacccacagctcttttcctgtctccttcagggaagcaaaggcatcccgagaggagaactttttgctgaacagccctgtcacgatgaccgccgctaaaatcgctgtaccagtcgctgacagcagatcaactttaaagactgcatctaacggcatggcagatggcgcaatcggcggcattttcataatttgctgatgcagaaaaggcattttgaacaggagcgttgattgatataacagcccgccttcttggaaaagcgctttgaaggcaggaaggctccagatggtgatcgccgcagttaaaatgtagaaaggagaccacgctttcgcaatatcagcagcacggtatgcctttttctcaccagcatcgccggccccttcctcgcggtaaatctctttcggctgccatttgcggaggaagagggcaagcccgcccatgctgaataaggccgccaaaatgtttgctaattccggcccgagcaccgccattgtcagtgtctgaaccgctgtatacccaccgctcacaaccagaagagcgggccatgtctgtttgattcctttcattcggtctaataagaatacaagcaggaatggtattaaaaatgagatcatcggcagtgtccacattaatgtccgtgacagctcaagagcagacaaatcaccaatctgcgcccctgtgatgacaggaatcccgatcgccccaaaggctccggaggcggcgtttgcaatcaagcagagcgccgccgcttttaacggtttaaaaccaagttcgacgagcagcgccgcactaatcgcaatcggaacaccaaaaccggccgcgccttctaaaaacgcgttaaaacaaaaaccaattaataatagctgtaatcgttggtcaggcgaaatgccggcaatgctggaccgaataatggtaaatttcccggttttcacggcgattttatacagccacaccgccatcaggacgatgtagccaatgggccacagcccgctcccgattcctaacaaaacagaagaaatcgctttttcaaccggcatatgaaatgccaaaacggagacgaagaaactgacggctagggtaagaaatgccgcaagaatgcctttcattttcaaaacagttaaagccaaaagaaaaaagagaatcggagtgagcgccacaagtgcgctcacatactcgtttccaaacggatcatacaactgctcccacattgacaatcagccctttactctaaagttgcggttagttgactttttgttctgcaaaatgaggttttaaaatgtttttaaggacgccggcgctgtgaaggaactgttctttttctttctcatttaagttcagctcagtgatacctgcgatccctccgcgattcacgacagccggcacaccgatgtacacgtcatctgcaccgtattgcccgtccaaatatgtgctgacagttaatatgctgttttcattatgaagaatggcttttgtaatgcgagcaagactcatcgcaactccataataagtcgcgccttttttctcaatgatatggtaagctgcgtttttcacatcatctacaatttggtccagctcctcttgtttgtacgcatcgtttttctcaacgagttcactgaccggcacaccgccgacattcgcgtggctccaaacaggaagctctgtgtcgccgtgctctccgataatatgcgcgtgcacgttttgaggcgctgcgccaaagtattcgctcagcatgaaacggaatctcgcagaatcaagtgttgtgccgcttccgatcacccgctcttttggcaggccgctgaatttccatgttgcgtaagtcaggatatcaaccggatttgtcgcgattaagaaaataccgtcaaatccgctcgccatgacttcattaacgatgcctttgaaaatcttcaagttcttttctactaattcaaggcgtgtctcaccaggtttttggtttgctccggcgcaaatgcagacaatatcagcatccttgcagtcttcatatgttccgtaagatgttttgaccggttgtggcgcaaacgcctttccgtggtttaaatccatcacatcgcccattgctttttctttatttacatcaatgaccacaagctcatctgtgatcccttggttaattaacgcaaatgcataactgcttccaacaaaacccgctccgattaaagctactttatttacatgtttgttcatcattaatcatccttccagggtatgtttctctttgatgtctttttgtttgtgaagtatttcacatttatattgtgcaacacttcacaaacttttgcaagggaaaagttttgtctgatttatgaacaaaaaagaaaccatctatgatggtttctttcggtaagtcccgtctagcattgtcctcaatggggaagagaaccgcttaagcccgagtcattatataaaccattttgcacgtaatcaaagccaggctgattctggccgggcacttgggcgctgccattattaaaaatcacttttgcgttggttgtatccgtgtccgcaggcagagtcagcgtgtaaattccgtctgcatttttagtcattggttttccaggccaagatccggtcaattcaattgcccggctcccatcatgtttatagatataagcatttacctggctccaatgattcggattttgatagccgatggttttggccgaagctggatctcttttaacaaaactgtattcctcggtcctcgttacaccatcactgttcgttccttttaacatgatggtgtatgttttgccaaatggatctccttttccgattgtgaattgatctccatccttaaacgctgtctctggtccattattgatttgataaacggcttttgttgtattcgcatctgcacgcaaggtaatcgtcagttgatcattgaaagaatgtgttacacctgttttgtaattctcaaggaaaacatgaggcgcttttgcaatatcatcaggataaagcacagctacagatctggcattgatcgtgcctgtcagtttaccatcattcacttgaaatgaacctgccccagctttattgtcatacctgccatcaggcaattttgttggcgtattgatagaaacagaggatgaacctgcatttgccagcacaacgccatgtgagccgcgctgattcataaatatctggttgtttccatttgggttcgagagttcctcaggctgtccagccatcacattgtgaaatctattgaccgcagtgatagcctgatcttcaaataaagcactcccgcgatcgcctatttggcttttccccgggaatctcacaccatttccgcctccctcaggtctggaaaagaaaagaggcgtactgcctgaacgagaagctatcaccgcccagcctaaacggatatcatcatcgctcatccatgtcgactcttcttcatcattggcgtacgtatcatgcgactccacccatgtcaccagcttgtccgcagacacatcagatgcatagtgggagagattcgacacgcccagattgcgattctttaaagcggaccttatggaatgtccatagttagacgctgtcacattcatataattcgcatatgcagcatccctggaagcactatcctgcaggatttctccgtattggaactctgcagctgtatttgtgatattcggccaaaattgactgccgtaactgccatcatccggaagctctatatgtttggcggcatcaaagcgaaatccgtctgccccgtcattcaatgctctttctaagaaccgtttcagataggactgtacttgtgtattttgtgtattccagtcatacagcccgagcaatgaattctgcgtgacatcccatcgatccgaccagtttttaatttgtgtgtttccatgtgtccagtttggaatactcttaatctcattggaaatcgcggcatagtcactggtggtatgattgatgaccgcgtcaacaatgacctttatgccatattcttcagcagctgcacacatttctttaaattcttgttcagttcctaagtaacggttgccaatttggtacgatgtcggctgatagagccagtaccagttcgacatgcttttatttccttggttcccttccttgacttggttaatcggagatgtctgaatggctgtatatcctgcatcatgaatatccttcatattatgttttaacgtattgaacgaccaattccatgcatgaagaatggttccgcttttgatcgacggtgctgtcagctcattcgatttgttcgccgtttcagcactcgcagccgccggtcctgccagaaccaaatgaaacagcaataaaaatccagcgaataacggcagtaaagaggttttgaatcgttttgcaaacattcttgacactccttatttgattttttgaagacttacttcggagtcaaaaatccctcttacttcattcttccgcttcctcctttcaaactgatgtgaagactggagaattttgttaacgcttacattttaaattatcacaatcactctatcaaaacaacttggcagagtgaatacaaatcaatgttcctataaaaaaagctgcccgaaactgtgaacgcttccctcgctttccaaacaaaaaaagaaaccatctatttttcaagatgatttcttttttatttcttcttttaccgctcttctgtaagccagcttcacaatcacataccgaagcagaaacagaacgccgccgcagacgataaaaagaagaatcattttcagccaagcgaagaatgtatggggaatccccctgtcgtacatcgtaagcaccactaccgcaaaggcgaccgcaattgattctattcgctgctgcttcacccgtttttgcagttcttctttggtgtctattctcggcatgagcattccggatgccgcagccctgatgcagtaatataagataatgatgaacaaaaacacaaggcttgcagcccattctttaaacggaaattcaaacataatgccgcggatgatcacatcaagcagcgcaaatgctcccgctatcatcccaatctccgaccagattttttgttctttttcttttactctcttatttttcccattcacgcctgaaagtctattacgcagattattcatgaccttcctcccgcacttttacgaatggcttatggcttacatgttacaataacagcctgcgcttctgcaatgaataactcaaaagcccgccgtacaagccggcgggcagcaatcgttaaaacggcccccaattgatcatgacgccgatcacgataaagacaagcccgatcaagaaccaaatcagagcaagcggcaccataaaccgcagccacttgacatacggaataccgctggcggcaagcaccgccatgagaacgccggatgtcgggttcacacagttgacgaccccttctccaagcataactgcctccaccgcaacctgtctcgtgattcccatcaaatcagcgagcggcgccaggattggaataaatacaacggcttcgccagaccctgaagagatgagaaaatgaagcagcgcactggcgatatacatgccgattgccccggcaatcgggctgaatccatccaaaagtgaagccaaagcattgacgacagtatcgagaagctttccattttcaaggataacggaaatgcttcgtgccatcccgacaatcagcgccccgtatacaagactttggcagcccgtaatgaaggttttggcaatatcgttcgccgcaagcccgcctattaaaccggcaaggacagaaataaaaataaatgtcgcagccatttgggaatctgaccagccaagcttcaaagcgccgtataaaaatccgacaagtgagagtcccgccacagccaaaatcagcttatggcgaacggtaaacggcactgactgatcttcttctttaccggcttcgcccattcctgccgcagggaaccaatctgttcctaacacactggcatcttttgatttttttaattttctcgtatacaaatagatataaataatagaagacagcaaaaagcatatgtatatcacaactcgcaggccgattccagaaaaaagagggagctccgcgattgattgtgataaaccgagcggtgacggtgataatatggtggagttaaatccagcgtagcagccgatgtatataacagcggctcccgcgactgcgtcccattttaaggatcgtgccacaatgaggccgatggggataaaaccgataactgaattcacgacaatcccggttgttccgagaatggagaacaatgcgccgacaatacaaataaataataattgctttgtgcggaatttgctgatgacattgtaaatcaggccattgatggcacccgttttttctagaatagcaatggtgccgcctgtgaataaaatcagaaagatgatgggtgctgatccaaccattccatcctgtagagaagtaaaaaagctgatcaagctgaccggagactgttcaattgaatgatagcttcccggaacagcggtcgtgacatccccctttgtcacgcggtcaaattcacctgccggcacaatatatgaagcgattgcgcaaatgaaagcaatcataaataagaggacataggcgtcaggcattttaaatgtcatacgttttttcttaggctgtgtttcggctgctggcatactcatatttcgatccatcccctctgtttgaaaatattaattattctgaaaagtagcaatatgtgctatattatatacagcctatcttcctgtttcaatataaataaagtaaagaaggtaaaaattcattctgatagaaggaggtatttcttaccatgcaaaagctttcagaagacatgaaacaaaccattatggacatcttcgagcatctgcacgcgaaccctgaagtcagctggaaggaatatgagacaacttcatttttgaaacaaaagcttgaggatttagggtgccggacgcgcacgttttcagactgcaccggggttgtcggcgaaatcggctcaggctcacctgttgtagcggtacgcgctgatattgacgcgctgtggcaggaggttaacggcacatttcgcgccaaccattcctgcggacacgattcacatatgacaatggcattgggcacgttaatgctgctaaaaaaacaacctgagcttccgaagggcacaatccgttttatctttcagccggcagaagaaaaaggcggcggcgccttgaaaatgatagaagaaggcgtgcttgatgatatcgactatttgtatggcgttcacgtccgtccgatccaggaaacacagaacggccgctgcgctccgtctattctgcacggatcaagccagcacattgagggaacgatcatcggggaagaggctcacggcgcccgtccgcacctcgggaaaaacagcattgaaattgcggcatttcttgtacataagctcggactcattcatattgacccgcaaatcccgcataccgtcaaaatgacaaaacttcaagccggcggtgaaagctctaacatcattccaggaaaagcatcgttcagccttgatttgcgcgcacagaccaatgaagccatggaggcgttaatcgccgaaacagaaagagcctgtgaagcggccgccgctgcattcggcgcaaaaatcgagctgcaaaaagaacacagccttcctgcggcaacacaaaacaaagaagctgaagcgatcatggcagaagccattacagatatcatcggggctgagcggcttgatgacccgcttgtcactaccggcggagaggatttccatttttacgccgtgaaggtgccgaatctgaaaacaacgatgcttggcctaggctgcgggctccagccggggctccatcatccgcacatgacctttgacagaaatgcgatgttcaacggcattcacattttagcgaatgccgtgctcaaaacatttcagaaggcggaatcacttgctgccgctaacgcttcttaacgcaaaaaagcagcctggctacaggctgctttctccattatttattcaaatcttcaattgagttgacatttttcatatattgaggaacaacaagccccatcttcacaccagtcatactggtgccaatatcatcatatttgcctttatatttagcggcgtatgctttatgggtattcggcagccatgcggaaagggatgcatccgcacttcccgtcgcaattgcagtccacatcggcccagcctctacctgagtaagtgttacctcatagcccaagtcttctaagactttgcctatgacgtttgtacttgcaatctcactgtcccacgccacataggcaaggttgattttgtctcccttcaccttttgaacgccttttgtccattcggcaatctgatccttgtgtttattgacgtactcagcagcaactttggcaggtttctcgccttcttccaccttgatcatgatttcgcccatttcgtcttgcgtccatttaaactggctcagaagctttgcggcattcggctgctctttgctgaagcctttgcgtgtgatcgtatggatttcctctgcgctgccataagattgtttcggatcatcgagatatttcagcttatatctggagaacatccagtgcggagtccatcctgtaatgataatcggcttcttacggtcatatgactttttaagcgtagcagtcatcgcagcacttgacgctgaaatcaatgtccagtcattcaggtcataatccttcatcgctttgtcagtcagggacataatccctgaaccggggtcaatcccgatgatggtcttattcacttgttctgctgcggatgcattttcatcgttttctgaaccgcaagccgcaagtgagagcgccagcatggcggaaacgccgatgccgatgatttttttaagcatcaggcattccccctgcttttcttcttcactttaatattttgagtaatacggtccagggtaatagcaacgataacgatggcgataccggcctctactccgaccccggttttcagctgtgtaacggcactgtatacttcagaaccaagtcccggtgcaccgaccattgcggcgataacaaccattgataatgcaagcatgatgctctggttgatcccggccaaaatcgtttttgtcgcaagcggaagctgaactttaaacaaacgctgagctgttgtagaaccgaatgcctcagtcgcttcaatcaaatccgccggcacttgtttaataccgagaacagtcatgcggattgtcggcggcatcgcgaagataacagatgcaacaacacccggcacaacaccgatgttaaagaagaaaatcgccggcaatagatatacgaaagcaggcattgtctgcattaaatcaagaattggcgttacaatacggcgaaccgtttctttctgagacgcccaaattccgatcggaaccccgaccacaatcgaaataatcacagatgtcaaaacaagcgccaatgtttgcagcattgggtcccaatatcctaaataatcgatcaggaggaatccaatcaacgtaaataacgcaattccccttgtactgatccaccacgcaagtgcggcgaaaataatcgttaacaaaatagatggaataaatccaagaccggtgacaattccatttacaaaagcggccaatccgttagcgattccgtcgaagaatccgccaaacgtcatcgtaatccagtcaacaaaacggtcaataatatctgctaaaggtattctaggcagtctatccatcttatttcacctcctgtgcagaaggatcttgtgtttgttcgttagtgccttcagcattgatatactcgttattgccggcaagtgcgccaatcagcgcgcctcttacaacaattcctttcattctttgcttctcatccacaaccgcaattggaatattcgcatcggacacaacgtcaaaaatctcagtcagatacgtattctctggtacagtcgtaaattctgtattcaagatgtcttgaagtgacaaatcagactcagccgcttttttcgcatcagacgcatagataacacctaataatttcttttgtttatccactgcataaattgaagaaattccaaggtttttcatcagtgtcaatgctacgcgaggccctttatcaatccgcactgtttcagcgcgtttcataatgtggcctgctgtgaggactttagacaaatcaacatcttcgacgaatttctcaacatattcgttagatggattcatcaggatttcttcaggcgtgccgatttgaacgatgttgccgtccttcattaggacaattctgtcgccgatccgcaacgcttcgtccaagtcatgcgtaataaagataatcgtttttccgacattatcgtgaagatcaagaagttcatcctgcatatctttacgaatcaatggatcaagcgcactgaacgcttcgtccatcagaaggatgtccggatcatttgtcaacgcgcgggcaaggccgacacgctgctgcatcccgccggaaagctggtcgggatattggcgttcaaatccttccagtccaacgagcttaagagactcaagcgctttttgctgccgctcttgtttgtctacaccttgaagctccagtccgtattctgtgttttcaagtatcgttctgtgcgggaacagagcgaacttttggaagaccatgctgattttcttccggcggacttcccggagctggtctttagacatatttgttatcatgtcaccatcaatgtaaatatttccggcagtcggttcaataagccggtttaacatccgtactaaagttgatttaccgctccctgatagacccatgatgacaaatatctcaccatcatatacttcaaaatctgcctgattaaccccaacggttgatccggttgctttcaggatctctttttttgtctttccgttggcaagcatttgaactgccttctttgtttgtttcccaaaaatcttagagactttctcgacttttatcttaattggtttctcatctacactcatattttccctccatattaagcaatctttattaccgtaacatttatgtaacttcccacacaaacagcatattctcttttattctgtaccatttctttataaacatccatgtgaccacatgatcttatttatgcttctaaatgctctgtaatcctcctatatgattgtattttacgggtgatttttcgcctatctttagttgaaaacgcttttattggaattgaattccttcttcctcttatgacttccctctcctttactggaaaaataagttgctttttcaacatcaattatgtattatagtttcatgactatgaaacaatcagatgatcaaatcagagcgcaaatttttaaagcactgtctgatgaatcaaggcttgccattattcgtacgctttatgtcagcggaaaagaactcagctgcggtgaagtaggtgaaaagtgcaatattgtcaaaaccacggcatcttatcattttaaaacgctgcgtgaagcgggattgacggcaacccggaaagattcgcgtacaaaatacgtcagtctgcgtgaagacacatttcaaacatacctgcctggctttttggaaaccctctaacaaagggttttctctatacatatctgtttcatagtttcaaagttataaaacaataggagtgataaaatttgaatcgcatttggcttttcttcagtgtcatgtttgtcattggcacggatacctttttgctttcgccgcttctcccccttttacaggatcagtttcatgtctctactgatttgtcaggctggatggtcagtgcttatgcactcggttatgcgctcttcgctttcattgcaggcccaatctcagaccggctgaacaggaaaacagtcatgctgtggggacttgcaggctttatcgtatccacatttttatgcggcatcgctccctcttttgccgccatgtgcctgttccgttttgccgcaggcgttagcgctgcgtttgtgacgcctcaaatttgggcgtccatcccagtcattgtccagccttctcagatcataaaaggcatggggattgcgacagcaggtttggccgcttcacaaatgctcggacttcctattggagggtttctcgcttcctttacatggcatacgccatttttcgttttgtcagcgtgctcgcttattcttctattgatcctggcggcggtcatgcctggcatccggccttctgaaccattggcgcgcccatcaattgtcaacccctatcgggagcttttttcattgccgaaaacatcggtcattctgcttgcctattttctgtttcaaaccggaaacttcgcatcgttcagctttctgggtacttggctttccgcggattatcatttaaccgtgtcacaaattggcgcagctatgcttgtactcggactgggaaatatgctcgggagccttatcggcagccgggtttcagaaaagctgggcatgtttaaaacactgatcagcgggatgctgctaatgggcgctctctatttcgctcttccgttctttccaaacttgtttttagtagaagccggcttttttctcacgttctttacagctggcatcatctttccgttaatgatgggtgtctttcaatccattgcaccaaatgcgcgaggaaccatcgcttccctttccaatgccgctatgtatgccggaaccactgtcggtacaagtattgcaggttttttatatcaaagcacacagcatttcggagctgtcacaggatttactgccattctgttcatactttctatgacgctctaccagacaatcagtaaaaccgggaaacgccaatccacagcccgggcgcagatgtaaaaaaaaaaaagcacctcattcaagaggtgcctcagattgttgacaaaatcctaaaatggttttcattttaggattttgtcatcttttcagcgtgattgaaaacccttgaagtctaggaaggacgagcataggagcggacattcacaggatgtgatgacgacggcgtttaggcaggacgcctgagaatttagccgttgatccacttcgcattgagcaccgaagcgcagtcctgacaacgaatgcgagggtttgtcgacacgctgaaagcacctcttttaagaggtgcttttcctattctagctcagtttgtttcgtttctttccccataatcaaaatacaagcaaccgcgagtaagattgcaatgcaaaagattgaaaagatgaccgaaaacgaaatatgacgggctgccagggttccgacgagcaaaggcccgaagatgccgccgattcttccaaacgctgctgtcgttcctgaacctgttgctcgaatcgcagtcgggtattgctccggggtataagcatacagcacgccccatgcaccgagattgaaaaacgataacagcattccagccgtaagcagaagacttaaggaatccgccgttccgaagaaataggcgcttcctgctgtgccaatcaagtaaatgacgagtatccacttccggcccgctttttcaatcagccatgcggcagagaaatagcccggtagctgagcaagcgtcatcagcaggacatattcaaagctttgaatcatgctgaagcctttcagcagcatgacactcgggagccataggaacatgccgtaataagaaaacaccacacagaaccaaacgatcgacagcatcaccgtcggccgtatatactgtcttgcccagacgctttttacattctcccacaccgacctctttttggcagaaagcgattcatatttcggcgaatcaggcagactcgtccgcaggtacagcgcataaaaagcagtcagcgcagttaacagaagggcagcctgccagccgaagcttggtatcacaaagtaagaaatcaaggccgctgcgagccagcccacggcccaaaagctttccaaaagcacaatcactctgccccgcttttcaggcacaaccgcttccgaaacgagtgttgaagcgactggaagctcgccgccaagtcccataccaatcacgaaacgaaggattagaaatgccgataagctcgtcacaaaagcggaaatgccgcttccgatggaaaagcataaaagggtgatgatgaacacttttttgcggccgattcgatcagcaagcaaaccaaacaaaaacgcacccgcagccatgccgatggaattgacgcttccgatccatttcatttcctcgggcgacagattccactctacatggagcgcggcgataataaacgataatattccgacatccattgcatcaaacagccaccccaaaccggcgacgcccagcagtttacgctgggatataggctgttgttttcccattgccaacacctctgatatgcaaaatgattaccgtttaagtttacacctgtctttacacattgtcattaactaaatgatgtaattgaaaaaccccgcttatgttccacaagcggggtttttattattgctgcaatgctgcttttttaatattatcctgaagctgtgcaattcgtctcgcgccgtcttcgcggaggcgcttgttttcttcttcgatttgttttgtttcctgcatgccgctgacaatcgtgttccaagacgattcaatcgtttcaatatctatgctcggtctgccggccattctcgcaatttcaacactttggctcgagatgttttcagcatttcgtttcagcatctcgtttgtccggcggtcaagctcgctcatggaatcagccacaagcttttgccgctttaccgtaacagcctgaataatgccgtttttgaaaatcggaatggtaatgataaacgcggagttgattttcccgatcagctttgcatttcctcgctgcaggagacggatttgaggtgcagtttgaagcgccaccatccgtgccatgtccagatcatacacccgttcctcaagcgcctgaatgccgttgcgcaacgtatcgagctgcatttgcgccagctggttcccgcttgccgctttttcctcatatgaaggaaggatcgactgcatctcttccagtttcatctgcccggcaacgacgtatttttcaagctccatatagtatttgatattgttttcatacatttcatcgagcgtgtagttcgtcttcgtcatctcatctttgtattttgaaatctcaacgtggattttttcaatctctccgccaagtgtctgatactttttaaagattttttcaatcatgctgccgccgcgtttgaaaatcttcgccattaatccctttggctcatcaaaatcatttttgtcgaagcggtccatgattttcccaagctgagtcagcattgtgccggagtctgtcacgcttgttgttttcatcatccctaagatgcggtcagagaacttggatatttcaatggctggctccttgccgtactcaagcagctccatttggtttttgacatcaatttgttgagcaagccgcttcacttctggttcctgacggagctgaagacggatatcgtcagctttttgctgggaaatctcttcatttttatcgagaacaagcggattttgattttctgttgtcatgcttttcttctctccttatttttgggtaatggttctgaagagccttttcacaagcgaaggctctttgtagtcctgctgaaacaccatgtcatccagccagtggatatcatactggtcatcttcaataaactgctcaatatcttggtgtccgggcggattataaatgatgatatcgattccgatttcattcaagaacagcagggcggcagcatccgaacgcgtgagtccgccgctcatttccgtatgatataaaacaagtttcggaacggtttgcgcatagtcgaacatttgaatcaatttcagcaaattagcaggcaggtttgttgtttgtttaaacaaatagatttgaacatccttgacttgttcctgatgcaaagccttaagccgcgggtgcctgcacattctcgaaatcgttttggcaatggcagtctgaacgcccgccggcagctgtttgtactgccacacattgcttgccatcagcttgtccggatcaatgttcccttcttgatcaagtgcgtggctgtagtgaaattgatagttcgactttatttcttctgtaaatggaaagcttctgaccatttctgtttcctgataatccgctagagtatgaagcctgttccaatattccttattgtctttcgacacgcccataattttggcgaatacattcggaatctcaatggaatgtttatcagctttgaaattcggccgaataaaggcgcgttctttcgtgattaaaaacaattcatcataggtcgttttcagcgtaacggacaccggtgtgtgatctctgaactgccacggcttatacagcatggattcctcgtgattcagcacatgttcaatttcctttgttgagcggtaagccactgttgatttccggtctggtttttctttcggaaacggctgaagctccgaaacatccgggagcttttccgtaaaaccgagctcctgcttcgggtcgacaagcgccagctgatccgttcccgccggatggaacagcagtacatcacagccgaccagcatcagataatataagaaatagagctggcttttcgtcgcatctccataccaaacaaccttcggcatctcccgctctatatcggttttttccagccaagggttcagatggtttaaggaaaacttcgagacatcaagcagcactctgcgaaaatcaggatgattcagccccttttcatgactgtccgcaaaggtatgtaaaagcgtcatcagcgcttttcttaaatggcggtgcatcaggggatttgagtgcttcgcaatcagcttttccccgtccagaaaggcaacaaagcggctgactgacagccctttttctttctgattgatggaatgaatatgctgaagcttttgaaatgtttccggttcgattgttttatcaagcgtttcactcaaaatcgttatgcggtcgtttacagacagctcatacagctcgttatagtaatccgtctcatcaataggcgtgcccaatatctgaccggcaagacgagaaaaagaaaggccttgtgcagtttcatagtgatcccgctccggcaatggctgaaacagcaggcttttccaatcgccatcagccggaagtgctttatgaatggttagttcttcttgtctcatcatatcctcctttccggtttgtcattgaacgatatttcggtaacaaaaaaggaaggacattgaacctccctccttgttttgttttattcttcttttgaagcggctgtttgttcgcgcacctgcttttgtttattgatgtagtgaatgatcaatgttaccgcaaatgcagcgataatgataatgaagaatacagagtgcggcatttcgtaatggaaagcgctccccgccattttcagcgcgataatgccgattaagacgaatgctgtgttttccagctcaggaattttatcaatcagcacaaggaatacttttgccactgtacgcatcattaaaataccaagcataccgccaatcagaagcacccatactttttcagatactgcaaacgcggccaggatgctgtccacagagaaggcaagatccattaattctactgaaatgacagtcgcccagaagatcccgaacgtgcggaccatccaagagtttttcttgatgccgtccgcttcctcttctttttcgccaatccagaagtgcttaatgacgagccaagccaggtaaagcgcgccaagcaccttgatccaccagaatttaatgagaagcataccgagcccgatgaaaataaacctgaaaatataagctccaaacaaaccatacgttaacgcttttttccgctgtttttccggcaggtgtttaaccatgaccgcaagaacaagcgcgttatcggccgataaaaggccttccagaacaacaagggaaccgatcaaaccccaggaaacaggatcagtcagaactcccccccacattttccaatcgaaaaatgaagcatacgtagacaaaatatgatgtaaaaagtccaagttttttcctcctattaatttgaaacggtgacttctctatttgtcactcgcttacacttgcaaaccgtaattccggcacaatgcagccagcccgccggaaaatccgctgccgattgcattgaatttccactcgccgccgtgtctgtaaagctcacaaacgacaacagctgtttcaatggagaagtcttctcccaaatcgaagcgaagaagctcattctgcgtctcttcatccacaacgcggacaaatgcattggaaacttgtccaaagttttggctgcgtgcttcagcgtcgtgaatggtcactgtgatgccgattttctcaatgtgagcagggatttttgagaaatcaacgataatctgctcatcatctccgtcgccctcacccgtgcggttgtcacccgtatggatgacaccgccgctcggatgttcaaggttattatagaagacgaaatcgagatcatttacgcagttatcatgcgcatcaactaaaaaggccgaagcatccaggtcaaaatcgtgtccgccggagtacttgtttgtatcccagcctaagccgatcaccgctttagtcagtcccggatttgtttttgttaaatcaatgcgctgtccttttgataattgaatggccatactgcctctctcctttctgctcttcgtatttgtcttaaccgacttgcaaaccgtagtctgttgcaatgcgggcaaggccgccttggtagcctgagccgattgctgagaatttccactcgccgttatgtctgtaaagctcccctgcaatgattgccgtttcaatagagaaatcttctgcaagatcgtaacggatgagctcttcatttgtttcttcatttacgatgcggacaaacgcgtttgatacttgtccaaagttttggctgcgcgcttctgcatcgtgaatggtaataacaaatgagattttatcaatgtttgccggtacagcgctgagatttacttttacattctcatcgtcgccttcgccagcaccagtcaggttgtcgcctgaatgaacgactgaaccgttgccgccttcaagctggttgtagaaaataaagtcgtttggtgacgcgcatttgcctgcggcgtctaacagaaacacacttgagtcaagatcaaagtcgtgtccgccgtcatacttgttcgtatcccagcctaaaccgacaacaacctttgaaagacccggatttgtttttgttaaatctactttttgtccttttgccaatgaaattgtcatgtttcatccactccttttcttttatacgtatcggctgataatatcttctaatctcgtatcgtttgtgccttcaccgatcgccgcaaacttccactcactgccgctgcggtagatttctgctgtaatcaggcttgttctgccggcgtaattgtctctcaaattgtacttgagcatttcctcgtgattagattgatcaactacgcggataaacgcattttgaatcatgccaaaatcttgttttcttctgacacaatcgtaaatgttcactacaaatacaagcttatcaatgtttgcaggcactttatctaaatctatcataatttgctcgtcatcgcctgcaccgtcacccgtcaggttgtcgcctgtatgctgtacaccgccgcagcggcttttcaggttgccgaaataaatcaggtttttcttatcggtgaattttccgttttccagcatcagcactgaagcgtcacagtcgatattcggaccgcctccgccaagcagtttgctgaagaatcctccgcctgaggacactgggtcccagccgagaccgaccatcaattttgacagaccggcttttccttttgttaaatcaattcgttgacctttttctaaagaaattgccacacgattcactcctactcatcgaaatgtgaagatagtcacatttatttttacgctcacaaggaaaataagccgtaaattactaatatatacgtttgttattatatcaaagtttcgtaaaagttaagaataattgacgaaaaacctcgaaaaaaaacttccatatttgatatatgatttgcaaatgctataaagtgcgcttcttaaacaaaccatttgacgcgggcaagtcattttgcctattctggtgtcaccacctaaaaacagacagaaaggaagcggccttttgattcatttaagcatacttgatcaggcacctgtttctaaaggagaaagccctgtgacaactctccagcattcggttgagcttgcccaattaagcgaagagtggggctataagcgttattggtttgccgagcatcacagcacgaaaggactggcaagcacagcgcctgaaatcatgatcgcccgcatcgcagcacagacaaacaccattcgtgtcggatcaggcggcgtgcttctgccccaatacagcccatttaaagtggctgaaacctttcgccagcttgaggccctgtatccaaaccggattgacctcggcgtcggtcgctcccccggcggcacgacaaaaaccagacttgcattaacggacggggtgaaaaaaagcttaaccgaatttaacagacagctgcaggatgtctcttattttctaacagattcccttcctcccgaccatccgtatgccggaatcaaagcggcgccccttattggtacggcacccgagctatgggtgctcggtcttggtgaaaacagcgcaagacgcgcggcgcaccaggggattggatatgtatttgggcatttcattaatcccgagcgaggagaaaatgcattccgcatctaccgggaaagctttcggccctcagcccatttttcgaatccatccgcactgtttacgatttttgtcatttgcgcaaaaacagatgaagaggcagaagaactcgcattaagccaggatctgtggcttcttcgcgtcggaaaaggcttggacagccgcgtgccaagcatcgaggaggcaaaagcctatccctacacagcgtccgataaaaaactcatagaagaaaacagaaagcggatggtgatcggttctccaaccactgtcaaacaacagctgttagacctcacaggccgctacgaaacaaatgaaatcatggttctgtgcaatgtgtttgattttgaggcgaaaaaagaatcgtatgagcgccttgccagattgtttctataaaaaaagcagttttccctagggaaaactgcttttcatgttatcggcttctttttttgcgctgagcttcttttttgataaacgtccaaactccctgaactgcaaatccgattaatagcaaaacgatcaatagcagggtaatagacggacctggcggcgtcccgagctgataggatgatgtcagtcccgtaaatacgctgaataatgaaatgagtatggctgtaatgaaaaccatgttaaagccttttgcaattctgatggcgaaggctgccggcaatacgagcagggccgatacaagaaggaccccgatgatcggaataatgactgaaatcgcaaggcctgtgacaatactgaatgacaacgagagaacgtttgtattgattcccgatgttttggctgttgcttcatcaaacgtcagcaggtagagcggccttctcagtacgataaaataaagcatgatcagcagtgtgataatactgataatatagacctgctgctggtttactgtcacaagcgatccaaataggtattgatcgatgctcatattggctgtgcctttggaaaggctgattaaaaacatcgcgaaggacaaaccagctgccattaagatggcaatggacacttctgaataagtccgatacgcccgccgcatgtattcaattccgatcgcgccgatggtcacgacgactatgcttgctgcggttatattggtgctgagaaaaaagccgatggcaacacctgacaatgagatatgtgaaagtgtgtcagccattaaggcctgtcttctgagaacgagatacactcctagtatcggagccatgacggcgatcatgccgcctgctagaaaagctcgtcgcatgaattccaagtcaaacatttccatccgcctttttctcctctctctaatcgaatcactttatctaaaaattgctgtacttcgttttgttcgtgagtaaccatcacaactgtgcggttgtgatttttcacgagatgatgcataaattcgtaaaatccttttctgctgtcgtaatcaacagctgtcgtcggttcgtccagcatcagcagatccgggttgctggcgagcattctggcgatacagattttctgtttctgtccgcctgataaatcaccgattttacgatggcggaggtcccacatttccaccattttcaatgctttttctacttcaagatgatcttcttcatttaaacgtttaaaccatttcccttttgtatagcggcctgactgaacaagctccagcaccgtgctcggaaatccggcattaaatgaagaaatttgctgcgggacgtaccctatggtcaggcgtttcccttctgtattccttttactgatcgtcactgtgccttcccacggtttcagcatgccgagcattacctttatgagcgtcgatttagaggcgccgtttggtccagtgatgccgacgaactcaccgctttcaatatcaagtgatactttatctaaaacaggcgtatgggaatagccgaaaacgatatctttcaatgagacgagattcatgttaatcttcctttctcacaaagaaatagtgtgcacccctccggcgcacactatcttatgatttaaccaatagtgaatctttcagggcatcgaggttttgtttcataatgtcgatataccctaaacctttatcctgttcttctttgctcaagccttccagtgtattcagcacttctgtcttcgcgccgatttcactggcgagcgtatctgcgacctttgaggatgcaatttcttcaaagtaaataacttttacattatgttctttggcatatgttttcagctttgccaagctggctgcgctcggttcttggtcaggtgaaagccctgcaatcggaacctgcttcaagccgtattcttttgccagatagccaaaagctgtatgctgcgtgataaattcttttttctccgctttttttgcggttgtacgatatagtttatcaagatcctgcagttttgcaatatattctttactatttttctcatagtattctttgttatccgggtcctgcttcacgatttgagccgtaatatttttaacttccttctgtgccagaacagggctaagccatacgtgagggtccattgcatgactgtgctcatgctccccatgatcatgctcttcgtgttcttcttcagagccttccattaaatcaatgcctttgcttgcattaacgaaaacggcatggccttggcccatgcttttttcagctgacggaacccatgtctccatgtattcactattataaacgaacaaatcagcatcctgaatgttggcaatgtctttcggcgtcggttcccaatcatgcggttcaacggaagatgggattaacagatccacatcgcctttgtcttttacaatttgttttgtgaattcatacatcgggtagaacgttgtgacaacgtgcagtttatcaccctttgaatccgccgacccttttgttgatgagttgccgcatgctgcaactaataaaaagcacgctgcaatcacaaacaaaccgctccattttttaaacatatcgtatatcccctctttttcagtaactttaaatcaaaatgataacgattttgtaatcctatatcataataaaccgaagtcattacgttttgcaagaataaatttcattttcatttattcttcccgcctgcagagcgaatatatgtactaaaaaaacccggctaaaaatgccgggctacttcaatcattagtttgttttgtccagaagatagaccctgctctcataaggccggaacaccatttcgtcatcaagatcatcgttgttataattgctgagaagcagtgaggcctgagctttgccgcagttcttaggccactgaaaaacagcctgctcttttgaaaaattattgaccgacaaaagctgttgtttactgttttctctcatgtatacaaacaactgcggatcgtccggaagcaaaagatcaaagctccctttcatgaggtcagcgtactgctttctcaggctgatcagctttttgtaatagtttaagacagaatcaggatctccctgcgcttcctccacattgattgcggtgaagttcggattgaccttcagccaaggcgtgccgtcagtaaatccggcatttttgccgctgttccactgcatcggggtccgggcgtgatcccggcttttggctaagatcgatctcatcacatcatttggatcatagcctttttcaaacacccgtttatgatacatattgatcgtttggatatctttgtagtcttcaatccgggtgaacggcgcgtttgtcatcccgatttcttctccctgataaatatacggcgtgcccttcataaaataaattacggctgccagcattttcgctgatgctttgcggtattccccatcgtctccgaatctggacacaatccggggctggtcgtggttgcaccaaaacaatgtattccagccttgatgttcaagcttcttttgccattttgtcaaaaccgattttaaatcagaaagctcaaggggcttcaaatcccaatgttcttttccgggctgctgatcaagctccatatgctgaaagtgaaaaatcatattcagctcatgcttatctgttcccgtatatttcaggccttcttccggtgtgacactgccgacctctccgacagacatgacatcataatgagaaaacacttcatctgtgatttcttttaaatagtcatggattcgttcgccatttggctgaaagggcttcggctctgcctgctgattgatatagtcctcatacgaaggaagatattctttcttagaaatgagatggagctgatcaattcgcaaaccgtcgacccctttatcgagccaaaatttcatcatgtcatacaccgcctggcgaacttcgggattttcccagtttaaatcagcttgtttgacggcattcatatggagatagtattctccggtgtgctcttcgtattgccagaccgggcatccatagtttgagagccagtccgtcggcgggccgttctttgtgccgggacgccaataataatagctacggtatttgctgtttttgtccagctccgcttctttaaaccacggatgctcgaccgaggtgtgatttaacacaaagtccatcaccagctttaatccccgctgatgcacctggtccagcagctcgtgaaaatcgtccattgttccgtaagaatccataatcgccttatggtttgtcacatcatagccgtaatcaacattcggagaaggatagatcgggcaaatccaaatcacatctgccccgagctcctttatgtagtcaagacgggaaataatcccccgcaagtccccaattccgtctccattgctgtcctgaaagcttctcgggtaaatttggtacaccactgcatccttccaccagtctgttttcatcccgcaatccccctgttttgtcttctattcaagctgagatggataaagtgtcattccgccgtcgacgaaaagtgttgcgccggtcacatagcttgcttcctcagatacgagccaagctgctgctgccgccacttcttcaggctttccgaaggctttcatcgggatttttttcaattgtttttgcctgctctcttcctttttcgtatcaacatttgattctgtggcaatggtgccgggcgctatcgcattgacgcggattcccttatccgcataattgagcgccagcgtttccgtcatcatcttgatgccgcctttggatgtggaatactgaacgtttacagggcgcggaatctgctgatgaacacttgagatattcagcacattgcccttgatattgtttttcatcatgtggttaagtgctgctttcgctcccagaaaggttccggtaacattgacatcaatcactctctgccaatcttcaagactcatctcatgcggcatcgcctcaacgccgttaaaaccggagttgtttaccatcacatcgagcgtgccgaaatgctctaaagctgtgtccaagagcgcctgaatcccctcttcttttgacacgtccgcctcaactgagacggctttccctccgttctgcttaatgatttccagagtttcatctgctccagacgggtcgctgtggtaatttacaacaacattcattttctcctgtccgaaccgttccgcaatggctttcccgattccttttgaagaccctgtcacaatcgctgtttttccggttaaatctttgtacatacttgatatcctcctctgtttctcactatgcagtggaaaataccctgtttttccgagttgaaaacagcacaaaaaaagcagagaacctgtagttctctgccatttcctattgaaaacgctgctcggcaagcttctttttaatattcatcagcctgcggtaaaagaaagcggcggactcgtaatgttccaactgattgaaacgttccgctgtatcatgcagcagatcttcggcgtcagcaagaagctgcctggattccagcaggtcaaagcattctgtaagcacgttcaggtcgccgcttccaagatacagctcatgaatgaggcggaatttcgtcaagtacatgtcatcctcccattcagccgcgctctttatcccgcggtcataagcctctactgccttgtcgtattttccctctttacagtagatatgggtcagtgaaaatacagcttgaacagcttgctgaaagttgtgctcctcaaaaatggcggcggctgttttgaaatagccctccgcttctttgtaatcacccagactgtacttacagtgtccgacattataataggcagcagcgatcatgtacgcttcttcaagctgcctggcatgttctaaagcgctgcacaagtgggtcagtgctttttcatgatgatacacatcggtcaaatttccggcgatgataaattcacactgaacccggcggcgaccttacagttcatatttcgtatagatatcaagcgcctggctcgcataattcatggaaaaatacgtttgtttgatgtgataatacacttctgcgactttaaaaagaaactcagctttttcgatctcatcctcgacatactcgagcttttcctcggcatgtttataatggtcaatcgctaatatgaaatttttctgcttgaattcgtacattcctctgaaataataaaagtagtattccagtaagcccgtgagtttttgctgattgctttcaatttcgttcagcatatcagagaacggaggcttggtatcgctgtctttcaccggcatcagcttatcaagcatgattcgatgccggaattccatcaaagaaaaatataaaagcaagtcctgattctcttccatatcttctaaatcatattcaatctcctgctttaacgcttctgcttgatctgcttcaaatgcgcgaatgagcttgtaccattcattcagctttactgctacttcttctgatggaatctttgctctcatcggtctgcctccttcctcctgctactatttatgttatattttatcatagctgttcgcttttagagagagtcaatcacttaaaagcgttaacattcagcacatcttgagaaagtgagaccgatatgaacttacccgcaaaaacatttgttatcttatgtattctatttcttctagatctttgttttagttatattcggcatgaatggcattctcaaaacgccttgcaggacatgcctgtcccctcggatcttcatccgattgtgaagcagaatgccgatgcactcaaagccgctgcagcgaataaaggcattgacgtcgtcattactgaaggattcaggtcctttaaggaacaagatgaattatataaacagggacgtacaaaaaaagggaatattgtcacctatgcaagaggaggggaatcgtatcataactatggtttagcgattgatttcgcccttcaaaaaaaggatggcagcatcatatgggatatggaatatgacggcaatcaaaacggaaaatcagattggctggaggttgtcgagatcgctaagacactcggtttcgaatggggcggggattggaaacgattcaaggactacccccacttggagatgattcctaactagacacccctcacagccttttctttttccttatgtgcgcatcaatataggaagggtaaaccggcttatagacaagtttgcagtgctggtcactgcctgctgtaaaatcaggctgccattccagtttcacatcaaaagcggctaaaaatgcttctttcgcttcttcagcggaaacatccggcctgtgatttatcgcttccaattgttcaggttcaatatcaggcgccataaaagcgtcaatcaacccagtttccggattgacaatgatgcgggcagcgccgaaccgcagcggcactcctttataccagacagaaaaatggttgcggactctccctctttcatcaattcggacgggattcaccctgaaaaactcagccgctctcggatagagggcatacaaaaattgaagcgctatctcttggcattcttccgtggagcattggaggttgttccgccagtccataaaagaaagcgctgcttttaattttccggttcttttatccgtcttcattttgattgtatttttatttctcgtttcaaaatagcttcctatgcttaaatccttacgctccggcgcagcgcccctgcgccacgtgcttccaatttgttctccaaagtctctttcactgactttctgcatatcagaggtaaaacccagcaaggcaaatatatcaacttcttccttgttctgaagcggcggcagtggcgccgtgttttctattctttcatctgcgatatgctggtcgggcacaatttcgtctacatctgcgggatagctgtatcccggtagaatcggttcatatacaagccttggttcctgttcgccatcaatgacatcgtacatcagctcaaaagacattgtgtttaagtaatgggatacaaccttctcttttgctacaaattccgtcggaacttcggctttatgcccttccccgtaatatagaaagtggacaatctgaccgcttcgtgtcatatcaattaaaaagcctgaattgggaatcggaagccccagctccattttggtatagacaaaccggatgtgctgccccctttcttccttgccttgaaaatgaaaattcataaatgtgccgggatgattggcagcggcaaactgaagagccgtcagcttcagctcggcatctggaagttttttgtctgtctcggagtggacagttgttgaaaaggtgagcaaggcgccgtcatttctaagttcaactgtaatgtgcttttccggatctttagggtccttccagataaaatatgcctgcccgtacttcttttgcttttggtcgtaatcttctatctcaagctcataatgcgtcggtacatttccgatctcctgcgccttctttttcagctgtttattaaccaatgaagtcatccctttcaaagagtctacgacaaagagaatcctgtttattatataaaaagacctttcttcatttaaagtgaagaaaggtccttttctattattgtcattgttttttgagattctttctgttactttcatcacatactctcttctatatctgaggcaattgcgtgacttttggctgtttcaccatatgctgaagacaggctcccctgtatgtgcatcgataaaatgcggatacaccggcttatagacgagccggtagctgtgttcttcatcatccccgtactctctttcccagccaagctcaactttaaaatgctgccaaaagatagacttggcttgttcaactgaaatagccggcacaggatcaatggttgccagcttatttgggtcaatatccggtcccatataaacggtgatataccctgtctggcggctgacacaaattctgatctgcccaaatcggagcggaactccgtgacaatgcgcttcaaacgtaaaaccagcgactgcgttttcttcttcatctttttcgtcgtatctgatcctaaaatattgatcggcattcggaaataaagcaaatagaaagcgaagcgcgattttttcacactctgccaaggttactgtcagcggcccttttttctccataaatgacatgacgccttcgagttttccggtttctttgttatagatggttttcagcacttgatgagtccgtcccttaaaccagctgtccatgcttttatccgccggctgatacacagggtcatccggattccgccaaacgattccaattctcccatctcccaaatccgcttcccgctctttgacaaacccattttcaataccaatcatgctgtcaggatcggccttttcgcggatgccctcgaataaagggagaggaaagctctccggctccctgtaatcatcgtcatcatcaactgcttgttcttcttgaaccaaatccgcaggtacggtaatcgccctaccttcaggctcgtacaccaaatgcggctgatcatctccgtttttgtaaacagaacgatggagaacctcaaacaaaaggtcgaactccacgtccttcttgataaaggcaagtgcctcttcaacatccgcgacccgctttggcttgatgatgctgcccgcttcgccgtaataacggaagtaaacaatctcacctgataaggaaacatcagccataaatccgctcatggggagaggaagcccagcctccatttgaacatatgaaaatctcactttatcgccgtatgcacggtcattttcttcacgaacaaaggcagagagtgcccccggatgatgagtctcgacaaattggcgcatgatatcctctagtttctcctcagacagcctttctccgctttcaggctcaatatcacgggaaagggattccagctctccgtccggtccaagctccacgataatgccggtattctcatcctgaggatctgcccaacaaaaatgagctcttttatcatcaccgccataatcttcaatttccagttttaagtgtgtcggcacccggccgatttccagtgctttttgtttcagtccctctttcttcacaaaggcggcccctttcatccttcttaagttccctccaactaatcaaaaagtaatagtctaaaatacacagttttctgagtttaccagttttaccagaacatttttcaccaaaaataggatgatgaacctattcaatataaaagctaataatcttaaaattaattccgttgtaactttttataggtccattcatgacaaaggagggcggagtttccagaaaatccggtgaaaaccgtgagaaaagaactgatttttttggttatatgatgctaatccattcaaaaagatccatttctcaaagacaaaagactcccctttcctaaaccatttgaggaggaaaaatgaatgtttcagaaaaaaacgtacgctgttttcctaattcttctgctgatgatgtttacagctgcttgttccggcagcaaaacaagcgcggagaagaaagaatcagaaacagaaaaaagctcagatatagctcaagtcaaaatcaaggatgtctcttacacacttccgtctaaatatgataagtccacttcagatgaccagcttgtgttaaaagtcaatgtcgcggtgaaaaacacaggaaaagacccgctgaatgtagacagtatggatttcacattgtatcaaggtgataccaaaatgtctgacacagaccctgaagactatagcgaaaagcttcagggcagcacgattaacgctgacaaatccgttgaaggaaatcttttcttcgttgtagataaaggcaagcaatacgagcttaactatacgccggaatcttacggtgataaaaagccaaaatcagttacttttaaaattgacggaaaagacaaaaaaatcctggcgacggcagataagctccaagattctgcaaaagcgttatcagcttatgttgatgtccttcttttcggcaaagataacgccgatttcgaaaaaatcaccggcgctaacaaaaatgaaattgtaaatgattttaatgaatcagccaaagacggttatctctcagcttccggcctttccagcacatatgcggacagcaaagcgcttgataatatcgtgaacggcattaaagagggattaagcaaaaactcttccattcaagcaaaaacgacttcaatctctaaagacgaagcaattgttgaagccacagttaaacctgtagatgcatcttctctttcagaccgcatcgaagacaaagtgaaagactactacagtaaaaactctagtgccagctatgaagaggcagtgaaatacgcgcttcaagtctatcctgaggaattcaaaaagcttggacctgcttcatctgaaaaaacagttgaagtgaaaatgaagaaaaatgacatcgaccaatggcagcttgatatggatgattacagagcagcagaattagtcgaagcattcatcaaagaataaaacaccaaaaggaaatagccatgacggctatttccttttttatttgaaaatgtcgctgatgaaattcacttcatcttcggtcagttcaatgttcaaggttttcaggttatcctgtaattgctccggtcgtttagctcctggaataatggcatcaatcgccggtctcgttaacagccacgccaaggcgacatgtgccgtatccgcttgtttttcctccgctactgctttcagcttatctacttttttgagattgtggataaacgtttcaccctgaaattgaggtttatcctttctgaaatcatcaaagactgtgtcttgcgtgaattttcctgtcagcagtccggacgcaagcggaaagtaaggaataaaggagatgccttgtttttcacagtatggaagaagctctttctcggcatcacgctgtatgagagaatattcggcctggaagacctccaaatagccgtcagcattaaaatcctgcaattgctgataatcgaggttcgaagcgccgatcgctttgattttcccctcatccttcagctctttcaaagtgcccgccacttcagcgagaggtgtttttccatccggaaagtgaacataatacaaatcaatgtaatctgttttcagccgcttcaggctcttctccacctcgctgcgaagaaactcccggctattgtctaattcaatgctgccgtccacttctttatgagctcctttggtggcgatgatgagctcattccgcacgccgcgttcctgtacgacttcgccgattaattcttcagatcgccccaatccatatataaaggcggtatcgataaaattgacgccgccatccaatgccgtgcgcactaaatccttccctgtttcatcatttagatttggaaatagattatgcccgccgaccgcattcgcgccgaatccgatccgcttcaccttcagcttcgttttgccgagtgtacgtgtttgatccattgttccttctcctttgaaaccaattttgatgaaaaatagtgcagggtcactttttgtattagatatcctttttctattttccttcttttttcaggatatacaaaaaggagaaagtgtatttctcctttcgcaagtttattttggaagaacccatttgtctttcaggaagcaggctctggctagtaaaaagaagatggcgatgagcacggcgatggttcctgacgtagacaaaatggtagccgggtcaaccatcccgaataaaagctgtttaaataacgcatgcaggttcagaaacgggatgagaaagtatgataagtcaaattggttcggtgccttgctgaagatgaaaaacatcgggaacacaggcagaaagacgacgagagacatataactttgcgcttcttttaccgagctggacatgatgctgatgaaaagctccatcgcagatatcagcaatgcagagagcacaatgattaaggctgaagcgccgattacactccacatatgatctcccagctggaaggccgtttttaaattttcggtaaataacacggtggacaaaatcaaaaacaccaaagcaaatacacctgaagccacgccaaaagtggaaaccgcaagccacttgccgaccagcactttgtttctgctgactggcgttaatagcagcgcctcgattgactttcggtccttttcaccggccatgatatcaagagcgatcggcattgcgccggaaacaatggaagtcagaatcagcatgggcagaatggcggaaagcataatagcggaagtccctttctcctcatccgcttccttttgctgaattgtaaacggctggatcaccgattgatcaatatgcttatttgttaaacgttgctgcacaatttcatttttgtactgatctaaggcagactgcacaagctgcatggcatttgacgacccttgatcgattgaattgccgtaaacatcaaccttaaaaggtgtcatgctgttgacatatgagtcgaactctttcgggacgttcagataggcatctgcttttccttcatcaactgcctcttcaggctttgcaaatgtttttacgctgatttcgtcaatctcattaagcttgctttccagtgcgggcggaagcgaatggccgacagccagcgtgtactgctcccctttgtcggacagcatgctttcataaaaaaagacaagtccaagcatcataatcatcggcactaagattgtgagtaatatcgtttttctgtcgcgtaaagcgtcgatcatttcttttttataaatatggctcagcatttaagaaatccccctgacaagcttagacataaagatgtaattcaaatcctcactgcgctcgctctcgtatagtgattcaagcgcccctcggtaaatcacctctccgctgtgaatcatgatgacactgtcacagagcgcctgcacttcctccataatgtggctggagaaaagaatcgttttttgttctcttttcagctgctgtataaattcgcggaagatgttgcttgacgtaatatcaagcccagttgtcggctcatcaaataaaatgatgtccggatcgtgaatcagcgctctggcaatggcgactttctgcctcatgcctttcgaaaacccgcccactctccggttcatataatcgcgcatgccgaaccgtttcgataaatcttctattcttgctttgatctcgtggcggttcagcccatacagcctgccgaagtattggagattttctttagcggtcatcctgtcgtaaagcccggtttctcctccgaataagacaccgattctttgtttgacctcagccggctgcttgaccgtgtcaaagccgtctactgtgattacaccctgtgatggttcaagcaaggaagcaatcattctcagcatcgtcgttttgccggcaccgttttctccgagaatgccgacgacttctcctttttcaattgttaagcttacatctcgcaccgctttgactacttttttcttatcctgaaacctgcggctgcaatcggtcagtgtaatcatgtcacaatctcccttatctttatttctagtaatgactatatacgaaaagctggattagttggataaagttgtcgcgaagagttctttttatgtcgtgaaatgggatagaataaagatgattctatgtaactaggggaatgataatggtaaaagtcggacttgtagatgattatcgagtagatttagagaagttagaagcgatcgtgtccagaatgcaggacgtcgaaattgtcttttccaccgattcagcgaaggaagcctacaggcgggtaaagaacggagacattgatctgctgcttgccgatatcgagatgccccatatgtctggctacgagcttgctgatttgatcaaatcccattcacttgatgtggatgtgatttttgttaccggccacggcggttatgcggttcacgcctttgacctgaacgtccatgattatattatgaagccgtactatgccgaccgtctggccgcttccttcgaccggtacttgaaaaagaaaacggaaacgagtttgaatgggcgtatattgataaagcaaaagtctgaaatgcacgtcctgcaaaagaaggatattattttcgcagaacggacgggacgttcgacgacgattgtgacaaccgccgaagaggtgcaaacgtatcaaacattaaatgatattaaaggcgacctgcccgaaaaagattttcttcgttcgcatcgttcctttattatcaacattcattacataaagcatttttccgcttataccaagcattcattcacagtttcctttgagggaacgtctaaaaaagcgatgatcactaagcagcagcttgattattttcaaaactactatttttgaggagtttagtacgtgattaccctttttcaatgtctttatctgattttatttagtttcatatgttatcagggagctgctgctttttcacacagcacagccgcctcttggctcgccgctgctttaggcgcagctgctgcaggattgtacatttggaatacgaagcgggtgtggaaacactgttcctcagggctttgtgcgtggattgcggtgattcaagtgatgtcggtgggagtggtgttgattggcacagacatcatgccggtattatgtgtaatcgcgatatttgcagggtgtgaagggctccgtatcggacagtctgctttgcaggcaaggctttctgatcaaattgataagctgactcaagctgaacagcacgccaatcaaatgctgattgatgtcagaagccggaatcatgacacaatgaaacatatcactgcaatcaaatcagctcagcccaaggcagatacacaagcatatattcaaaactgggcggatcaatacagccaatatgaccgttttttgaaaggagagaacgcgtacgttgcaggggtgctttatgattttttagaaaaagcccgcgcctcgaatgtgagtgtttcgctgcatatgcatacaccgctttcttcccttccgttttcgcctgctgatcaggtcagcttggtcggcaacatattagaaaatgcgctcgacagcgcggcggaggcccgagaaaaagcagagattaaactggagacttcactgcgcagcgggctttatgtactgacttgtgaaaacagcactcccgggatggacccaaaagtgctcgatacaatttatcaatcgtttggccgctcaacgaaaaacggcgctcatgaaggcatgggcacatatatcattcaaaaactggtgaagggcgcttttggcaggctggattttacctaccgccaccccatcttccggttagaaatcaaaattccgtttcagaaataaaaaaaccttgaaaagcctggcttttcaaggttttttccattatgaggataacgcttgtgcaaaacgatctgcttcatcttgcagcgtgctttcaatttctttgtaacggctggaaatcgttgatgcgctaacgccgtattttttcgccagtttagcctgggaaacggacgcgccgttaagagaaattgcgtttacataatattcaactgccgccgcaaaagcttccggctttctgatgacaggtgattttttctcgcagaatgttttccagatgtcaataacagctgggatcaattcagtcggatactcttccccgctcatgccttcttcaatagccgcagcggtttctttctccaagtcgtttgcccactcaacagtgcttacttccgctttctctgcttgtggctcttcatctttctcagctaacaacgcgaacagaacgttgttgaattcctgcttcatgaagtcctccggcgttttgccgtccttcacagcggcatccgcatatttcttcaccttgctgatcagcgcttctgttctcttcaccgggaagatcgtgaactgcatgaagaattctgctttttccgcttcgtggattgggtatccaagaatcaggcttcccactggaggaaggtcttgattgctggcgtccatttccacttcgaattgttttgccgtaatgacatcttcaaagtgaatgatgccttccttcaggtccttcagcagcaataaagcaggcgtcatgctctgccatgattctacgatctcacgcgttttcggacgagtgatcgaatcgccttttttctgaaggtactcttcgaagattgtcttctcaccagcaagcgggtggaagaagattccccagattcctaagttaaatacgctgatgtctttcgtctgtctgtccatagcagaaagaaaatcatgctggttgataaagcctgaaatgctttctctatgtactgtgaaggcatactccactaagtcttcctgaatttgtttcgcttcttttgccgctagttccgccgggaagtcgacaactttacttccgcagcattttttatatttcttgccgctgccgcatgggcaaggggcatttcgtttcacttttcccacaataaaccctccgaattctgttgtaacttttctattttaacaaaaataacttctgagggcttggtttcgggctaaaaaagaatttggtaatgtgataagctggctgattatgccaatttacctatgacattttcaccaacttttgtgatttaaggcttatcacctattcccactttaggcccttcttttttacaatcattaggtgtttatttaacattttaaggagtgtttctattggaactagctggtttcatgctgcgcgcctgcgctcttttacttgatgtaatcattgccgcagcagtgattttggcagccggatttacgtttggcgatgggtccgccggtgtcattattgtcgccatattgatgctgattgtgtaccctttgctgatgccgctgacaaattggaagggcacactgggcaaaaaaatcatcgggctgcaaatcgtgagggacgaaacatataaaaaaatatccttcccgcaagccattgtccgttacctgatagcgtgggtgcatgtgttctcccgcctgatctatttgactgccgcatttacgaagaaaaaacaaaccgttcatgatatggctgcgaaaaccattgtgctgaaagcagaataaccttgaagaatagcattcttcaaggttttgtttttcattaattcgtattctggcccccgccgttcagcccttctttaatcaggctgttgacttggctgctgtacagaaggccgatgtgtccaacgccatggatttgaacgtttctagcaccatctaatcttgataagtaattcatgacaatcatatcggcactgctgtaaatggatgtgtataaaatcttttgatttggatctgttcccggaagcgccttgcctgtcgtcaaacggttcgcgccgccaagcgtcacgacgtttgcaactttatttccgccgtccagattttttatgtagtaaagtgtgttcgcgccccccatactgtgagcgacaatatccacttttttcgcacccgtttcatctaaaaccttttgcacaaatcgtgataataccggtccattgttataatttgtgcctgtcttgtcccaaaaatcaactgcatacagcttgtcccgcgaccagccctgagatacgagatagctcttaattcccgcaaaattgaatgatgcccctccaataccgtgaaccataacgactggattgtgttcagcggcttttgctgacggctgcaacgcaaacagcgatgtaacagacagcatcaaaattgttacaagtgcaatgatccttctttttacaaatttcataatatcctcctttttttgtaacaaattctccaaatatattacgttaccaaattaattaagtaaagggtaattttggcttatttttaaagaaattttaagattcataggtcattattggtcctaaaaagccaaaaaaagaaggcttattcgccttcttttcttcaatactcattgaaataagcttggattttttgaggatcatttgttttggtaagcgcaagcatcagcaacatccgtgctttttgggggtttaaagagttcgatgccagcaagtccttttccgcatagtcttggtttggtgtgacgacaccatttcccgtgcgggtagagcgcaccactgtgacgccttttttgactgcgctgtccgcccctttttcggctgcgtcagataaagacccgttcccagaaccggcaaatacaatcccctttgctccggcttttacagcagcgtcaaacaggtagcttccgtcattttggtatccatagataatgtcaacctgcggcagctcatcaagattagaaaccgagaaatccgtgtccttcgtatgcttacgggtaatctcattattaaaatagatatcatctgcaattgttccgacgaagcccatttcttctgatttaaatgtatctgttgtagttgtgtttgttttggtgacatatcgggctgaggcaatccggtcgttaagaacaacaagcgtccctttcccttttgcctcaggggcacctgccactttcactgcattgtacaggttagaaggcccatcagcgctgatggctgtggaaggtctcatcgaaccgacaataacaaccggtttatcacttttcacggtaagattcaaaaaataagcggtttcctccaatgtatctgttccatgagtcacgacgattccgtctacatcatctgaagcgagcaagtggttgatgcgtttcgccagcttcagcaatattttattatcaatatttgtgctgccgacgttaacaatctgctcgccgctgacgtttgcaatgtccttcatttctggaactgcctcgatcagtgattcaacgccgacaacacctgctttatattcagttgttgaggttttcgattgatcggcaccagctatcgtgcctcctgtcgctaaaattctagtgtttggcagatcctttttttcagaggcagaagccgaagagactttttgtgtctgcgttttttctttcggggattcttttgtttcaggagaatgtgaacatccggtaaaaacaaacaatagtgcggtaaaaagtacgagcattcgttgttttttcatctatttctctccttacatccatatgatgattaatcattgtacattttatctattcagtcaaaagatcagtcagcttttctctcagtattttttgttgtcatatccttctttttttgtcttttcatacaatgaatttttcttgacaattgatgattgaatcaagataatagaccagtcactatatttttgattgcaattcagtaaggtgggaatgttatgagttatggagattcccgtgagaaaatcctttcggcagctacccggctttttcagctgcaagggtattacggcacggggctgaaccagattataaaggaaagcggcgcgcctaaaggctctctttactaccactttcccgggggtaaagaacagcttgcgatcgaagccgtgaatgagatgaaggagtatatccgtcagaaaatcgcggactgcatggaatcctacaccgatccagcggaaggcattcaagcctttttgaaggagctctcctgccagttttcatgtacagaagacattgaaggcttgcctgtgggcttgctagcggctgagacgtcattgaaaagcgaaccgttgcgcgaagcctgtcatgaagcctacaaagaatgggcctctgtgtatgaggaaaaactgcggcagactggctgcagcgagagccgtgcaaaagaagccagcactgtggttaacgcgatgattgaaggcggcatccttttatctttgacggcaaaaaacagtacgccgctccttcatatctccagctgcattcctgacctgctgaagagataaaaaaacgacatactacatgcagttgatagagaggggaaatgattttggaaacaacagctaaagcatctcagcaatacaaagtgatgccgattatgatttccttgctgttggccggttttatcggcatgttcagtgaaacagcgctgaatattgcgttaaccgaccttatgaaggaattgaacattacagcggcaaccgtccaatggttaacgacgggctacctgcttgtactcggtatccttgttcctgtttcaggactgctgttgcagtggttcacaacaagacagctttttaccgtgtcacttatcttttcaattttaggtacattcattgcggcgcttgcgccgagcttctcgtttttattagcggcaaggatcgttcaggcacttggaaccggtcttttactgcccctaatgtttaacacaatcttggtgattttcccgcctcataaacggggtgccgcaatgggaacgatcgggcttgtcattatgttcgcgcccgccatcggcccaactttctcaggattggttctggagcatctcaactggcactggattttctggatctctcttccgttccttgtgctggcgcttgttttcggtatcgcatatatgcagaatgtatctgaaacgacaaagccgaaaatcgatgtattgtctatcatcctgtcgacgattggcttcggcggcattgtgttcggattcagcaacgcgggtgaaggctccgggggatggtccagcccgactgttatcgtgtcgctgattgtcggcgttgtcggccttatcctattttcaatccgccagctgacaatgaagcagccgatgatgaacctccgtgcgttcaaatacccaatgtttattttgggtgtgatcatggtgttcatttgtatgatggtcattctgtcatctatgctgcttctgccgatgtatctgcaaggcggcttagtcctgactgcatttgcatctggtcttgttctcttgccgggcggtattttaaatggatttatgtcccctgttacaggccgcttgttcgataaatacgggccgaaatggcttgtcattccgggatttgtgattgtcaccgttgtactatggttcttctcaaatgtcacgaccacttcaacagctgtgctgattatcatcctgcacacctgcttgatgatcgggatttctatgatcatgatgcctgcacagacaaacggtttaaaccaactgccgcgcgaattttatccagacggcaccgccattatgaacacgctgcagcaaatggctggcgctatcggaacagcggttgcggtcagcattatggctgcaggccagcatgattatatgagtacagttaaaaaccctgccgatccggcagtcatcccgcaagctttgacagcgggtgtacagcacgcatttgtgtttgcaatgattgttgccattatcggtttaattggcgctttctttatgaagcgcgtgaaggtagatcattaatatgaaaagcccctgactaatgttcaggggctttttttatgtttacttgtggatcattttcgccgcgatttcatcaatcgcgcgccgcatttcctccttcgtattataaaaatggggagcgagacggatcacattttcccgcggcgcgcaaatcacttttttcttcttcagcaacgccaccgtttccgatgcccgctcatcccggatcgcaaccatgcccggctgacccccaccttgtgccgccagctgcaggcctttttcagcggcatattgaactgcatcggcacagatcgttttcacatgatccctgatatgagaaaccccaatatgattcagcagcgataaagctgctgcagctgcgtatacgctgataaaagctggggtgcccgtttgaaaacgacgcgcgcctttcgcataagccccatcaaatccgttctctctgccgaaccaagctgatgctttcggtttcagtgcgtcagccagctcctttctcacataaagaaacgccacacccggtatgccgagcaaatacttccgggtgcctgctgccagcatatctacgccccattccttcacatcaatgggaatatgcccggctgattgataagcatctacaaacaataaagagccctttctctgagaaatctcggcaatcgcttttatatcctgaacatagccgtcacgataatgaacgtgaggaacacacgtcagtactgtttcatccgaaatatgcgtttcatattgttcaagcggcagcacgccgtctattgatggaatgacggatacggtataatcggagtgtgcctgccaaacatgaggcaccgccggaaaatccatatctgtatatacaacgtgcttctttccaaatgcagttaaggacgatgctacagaaaccagcgcatcagaaactgacggcacaatcgccacttcatccggttcagccccgatcagctttgcaaactcgtttctcgcaaactctgttttttcgatcgcttctttccagttcgtccccatatacaacaggctatcatgataatcctggatcgcccttgatacaggctctgccaaagcgctctgagaacagctggcaagcatcgtatgcgtctgcaaggttgggaataaatgacgatactgctgcggtaaatgctccattatgattcactcctttacattattttgatgaaaaacccataaataaacaatagaataaaagaaaaaggagatgagaagatgagaaaaaaagtgctgatcactggctttgacccttttgacaaagaaaccgtcaatccatcatgggaagcggcgaaacggcttaatggcttcgagacggaagaagccattattacagcggaacaaattccaaccgtctttagatccgctctgggcactctgcgccaagccattcaaacacatcagccagatatcgtgatttgtgtcggccaagcaggaggacggatgcagattacaccggaacgggtggcgatcaaccttgcagatgcgcgaatccccgataacgaaggacatcagccgattgatgaagagatttctccagatgggcccgccgcttactggacaaggcttcccgtgaaacgaatgactgctaagatgaaggaacacggcattccagctgcggtttcctacacagcggggacctttgtatgcaactatttgttctacgggttaatggatcacattagccggacatccccgcacattcgcggcggttttattcatattccttacattccgcagcaaacaatcgacaaaacagcgccgagcctcagcctggacacgattgtccgggcattgagaatcgccgctgttacggccgcacaatatgatgaggatgtgaagtcaccgggcggtacgctgcactaagcggccgccgctgtttcttccctcagcctctttttgtagacaaacgccgatagggtgacactcacttcaaacaggacaagaagcgggatcatcacgagaaaatcagaaataaaatcaggcggtgtaatcaatatagatacgacaatcagcagaaaataggacagctttctcgctttggccagtctgtaaggatttaagatgcccagccttgttaaaaacatcaccaccaagggcatctcaaacaagaagccgaacggcaggctcaaattcaccataaaccgaaagtagcggtcagccgtaaacatcgtttcaaagtggccggaggataaatgagtcaaaaagctgagcacgatcggaaacaagacaaagtatccgaaggagatgcccgccaaaaacaacgcaaataaacctggtatgtacatgagcgtcaccttgcgctccgttttcgtcagcgccggtgcaacgaaacgccacagctggtacgcggcaacagggatagaagccgcaatggcacaaatgccggaaagcatcatatacacccagaggatttcactcggcccaagcacagccagctttccatccaaatccctgatcagccagtcataaatgtcctgtacgaacaaaaaagccgtgatgagaaatagaaaaaatgccgcaagggtgacgataatccggcggcgaagctcttctaaatgcccgatcagatgggtttcttttttatccattcaaaaaagccctccctttcataaaaaaagaggcagacccggtgtctgcctcatcagcattcagcccgcgtttttgtcctgctttaccgctgtcagctcagctgatttctcttctttttcatcaccagacacaagtgattttgtggcgcttttaaattccagcagtgtccgtccggcggcacgcccgatttccggcagcttggaagggccaaaaataatgagggcgatgacgaagatgagaatcaagcccggtattccaatgtttgaaaacataatttccactccttaattcgtgatttttgcacgcttcttaatcatttgtttttcgtgggctttgttgtgcgaaaagaaacgatcctcttcgacctcatcggattgcttcaccccgccttggattgttgtggatgatacctttctcaacccggtttggtctttctggtaaacgaatgaagcccgcgtggaaatggctgcgcccggctcggtcacaaatggcatcacccgataatcggctttccactggtgaggcgtcactgtacagcggacatatccgcgatagtcgttaaagaacttgatgtgcggattttcttttaaaatttggtccgtatccgctcgcttatccgctccgttccctccggaagtgatcgaggttccaacaaattcggctccgaatatttttgaacttgtcttctcgaaatcgacatgcaaattcgatgcccagcttgcgtgtacatcacctgtcagtacgacaacattattcagatttttgcttttaatgaaattgataacccgttcgcgctgagccgggtagccgtcccacgaatccatgctgtagatcgggcttgcgcttgtcccgaaattccacttggcaaagaaaatctgctgcgccagcacattccagtgggctgtcgagctgcccaaattgttgaagagccactgctcctgttcttttccaagcagagtccgattcggattgcgcgattcatcagaaggcggcttattgccgtcgttattggcttggtcgtccctgtactggcgggtatcaagcacattgaaggacgccaggtttccgtacgtaaagtgccggtacagctgcatatctgggccattcggcaaagaggaaatgcggagcggcatatgttcatagtatgcctggtatgctgccgcgcggcggagcacgaatgcttcaaccgactgtcctttttcaggtattttattggcatagttgttttcaacttcatggtcatcccaagttacaacccaagggaatgccgcatgtgcagctttaagattggcgtcagaacggtattgagcgtgacggttccgatagtcttgcagcgtaatgatttccgcgctgttgtgcgtgcggacattgcctgtttttgatacatattcatttgggccgtattcatatatgtaatcaccgagatggaagacaagatcaagcttttcctttgccatatgcttgtaggccgtataatatccgtgctcatattgctggcaggaagcaaatgcaaaggtcatttgcggcacattggcgccaggggcaggcagtgtttttgtttttccgacagggcttagttcatggccggttttgaaacggtaatagtacactttgtttggctcaagcccgtccgcttccacatgaacggaatgggcaagacttggtttagccatttcagtgccttttcttacgattttgcggaaatgctcatcctttgcgacctcccatttgacaggcactgcttgcttcggcattcccccgccattcagcggatctggtgccagacgtgtccaaagcacgacactgtcagaaagcggatcacctgacgctacccctaatgtaaacggatagcttgagaatttaggcgcagcatttacttcaaaggccccaaccgactgggcaatcgttaatccaagagaaagtcctgcaatcttccccgctccttgaataaatttgcggcggtcaaacgtattgttttgaaagctttcctctttcagtttctgtacccattcatcaaaacgactgtcgtatgccattcaagatcccctctctcctcattgatcgtctccattataggaaatcattgttaaacgactgtgaagaagtgtgaactgattgtaagcgctgaacattaaaaacaggtcttccctcacaagcctgctgctgaaacatgccgaaagctggctgaatgacgcgttttctgcatatcctgtcgtttgcaagccgcccattcggcctatttttcttcacatgatcttaaaaaaacaaaaacaccgagccatttcgcagaatgactcagtgctctttatcagttatttcgaaaacaatctgctgaaaaagcccttctttttcggcttttcagcaggaggctcttgttctcttacaatccctttttccttcgcttctttcagccaaaatggaaattcagcaagcagagcatcataaagctcatcatcagaaatgcggtcaatctcttcgatatgcaggaagttcgtgttatcaatgacacgcccttctaacgtatccagtttattgagaaaatcaaagtttccgtttccgatgccgacaaactgccagaacaccggtttatcagaagaagcttcaattatcggtttgattgactttttacagcccccgtcattgataaaaacaatgaaagcaggatacgagctcggttcctccgtaacatatttgcgcagcacgtccttcatgactggcggctcatcatttctgccgaatttatgcaagcggtcattatttaaaatttcacgatcgacatagcccgaaaaatccttttctgaaactggctttaatcgggaaaattcattatcatacacccatacatccagcaaaccgttatcatcaaactgatcagccactgccaaaatccgctccaccacattttgaaccgtcccgtttttgtagagcggtctcatcgatcccgtaatatcaagaaccagtccaacacgagccgtcaccttcgttaactgctttttctccagtacgatctttacacttttcttttgcaggtcaattgttgccattctgtcatctccgtcagctcttttttctttgattatctcacaggaatattttgcattgcatcttttcaaagaaaaacaccgttcaatttgaacggtgtcctgtctctaaaatgtgttatatacattttcacacgtctccgccgtcggctgataaaagcagtgtgacttaaatctggccacaaacggctggttataccactgggctggacagtccccctgcggcctgaagtaccataaactaaattttgcaggccagcgcctttcaccattaatcgaccggcgtgcaagggcacgctcgctatctcgcgccctttgataaaaatatccatgagtcacagcctcaaacgcgtgtggctgataaatcatctgcctgatggtgcggaggcctttaaaatctgagcaattcgcccgcagccgattaattccaacgttgccgacaagcagcatcccctgcttgccttcgccttccgcttccgctctgagcagccttgccatcaaatcgacatccgcactcgttgctctcacgaccgccatcacgtcacctccccttgatctcttttcatcatatttcattacttcagaagtgatgacggagggacaggagaagtttttaaatttattcatctaaaaacagcaaacataatgggctgttgggcatcaaagcagcgtccggtgcagtacaagcttcacgtttccgctgtcgaagcgccgcagcctcaattcctggattcacatcattgacccctccccagcagatttgcacccgcctccgaaaagaaataaggtttaactttttacatttgaggaattatacataacaaatcaaatgacaaaaggagaaattgtaatgacacatgtgaaagcgctcgctattaaaggtattatgacgattattgtgttgtatctggtgcttggtctgggctttgggttcacgtttggtgatacgctgctaatgacgattgtgttaggggttatttcttatttgctgggcgatctttatgtattgccgaaatggaataatatgattgcaactttggctgattttgggttggcctttctcgtgatctggctgatgggcatgccgctttctatggggatgactggcggtgaagttgcattggcggctttattcggcgcgatcgtcatggcaatcggtgaatattgcttccatttctatatgatgagcaaagagattggcaagaagcattatcttgaaacaagaacagactcataatggaaaggccggtgctgacagcatcggccttttatacatattgggcgcctttgtttacgcatcctgcttgtccgcattcctgatcgccatgtaggaaaagaacaaaccgaatgccgctaacgataacgggatatacacaacagatgaaatcgagaagcccggacttgttgagctgatgagcatcacaattactacagatgaaatgatggtcgccggaaccgagtgtctacgcatcccaaaaaagatgggaactaaactggttccagcggcgccaaaagcgaaaaccgccattttgaccgcctgttgagaaatgatctcggaagtaagctctcccggtatgaaatggcagatcgagttcagccaaaagaaaccggcggctatgagtatatttgaaagtaaaatcgtgataaacgtcagtccgcccgcgatcatgagcttagcggtgagcagctttttacggctgatcgggtacgtgaacatcacaagaatggttttgtttttatattccgaaatcaccaattttacgatcagcacagcgccaaatacgataaataccgctctgacgaaggtgccgatgatgaggaatgcttcatccgtactttggaacgaaaccccgccatcggctttttcggaataactgatcagccacataaaacccataatgatcacgttggcaatgagggcacctctgatataccagcccattttcatttttcttaattcgattctgatcaaattcatcaacgtgtctctcctcctttacgcactgatgctattgccgttgatcaatttgataaaataatcctccagcgacgtatactttttgttcattgattcaatgtctacatcatttaaaatcaatgctttggatatggcagcctgagaggcttcagcctcgtaaattcgaatcgttttctcatttaatattttaaagttggttaattgcagctctttctccagcacaaagcaggcccttgtctgattcggcgtgacaagctcgatgtattcagtgttctggcccctgacatcctccattgatacctcttcaagcagcctgccgtcccgaatgacgccgattgtgtccgcgatttgttcgatttcacccagcaggtggcttgagatcagcagcgtcatcccgtactctttgctcagcacttgaaacaattgcctgatctttttaatgccgagagggtcaagaccattcaccggctcatccagaataagcaggtccggcttcgtgaggatggcacgcgcaattccaaggcgctgcttcatcccgagggaaaaggttttgacgggttttttgtcgatttgttttaaattcaccatatccagcacttcttgtatggcttttttattgtggtatcccatatattcacaatgcagatctaaattttcttcagctgtcaggttttcataaaaaatcggatattcaatcatgctgccgatgttccccagcacctcatatgacgtgtgggtgaacttgttcccaaggatgatgatttcaccgcttgtcggtttgacaaggctcgtcagcattttcataatggttgttttccccgcgccgttcgggccgagaaagccatagatttcaccttttttaatatgcatgctgacattggatacgacctctttgccctgatatgttttggtcagcccgtttgtttgtacgatataagtcaactttgtttctccttccctctcttttcctgttttctattgtagcggcgagccctgtcatttttatttctcaaaccttaagaaattcttacgattaatatgtcatgcgtttcaatgtgatcgtaaatgcagtccgttcgtacggcttgctttggacggatatgatgcctcccattttttctgtaagccgttttgtgatggttaaacccaagccgcttccttgaaatgctttatttctggattcttccagtgtgtacagcctctcaaacacccgctgctgatcggtttcactaatcccttttccgcgatcccatacggtgatggcgatgttcctctcatcataagacagcgtcagcccgattaacttgccggccgcgccatattgaatcgcattggacaataggttttgcaggattctgtccagagcctcttcattcgcctgcgcatacaccggcgtatcggggatatcgatggctgcttgaaagccttttgactgaacagcgtcataatagtgcaggatatttcgtttgcatatgtcgttcatatgtactttggtgatcgggatctctttatcttcagattctaatttcgctaaatcaaaaaaggaattgatcatctgaataagttcatttgttttctggcggagcttccccagcaatctttcccgctcttcgtccggcatgttcgggtcactttgaatggcttcaatataaccgagaatgaccgttaacggcgttttcaggtcgtgcgacatattggtcagcatccgcttcatggattgctctgttttggcaaattgggcgctgatctgctgacgattctcaacgataagattgatgttaacaagcaagtctttgagcgcatgatcgtctgtaggaagcaaaatttgtcctgccgaatcccggctgagcatgtagctaagctggtcagccgtgtaagccagattcccgtcccgcttctttttcattatgaattgaatcacattcagacacgccagagcgatgacagcggccacccatagcactgtcattctaaaactctcctaatttataaccgatgccccataacgttttaatatattgaggggaggaggggtcatcctcaatcttttctctgagccgccgcatatgtacgttaatgatgttctgatcatcaaagtactcttcattccaaacggaacggtagatttgttctttcgtaaacacttttttaggatttgatgcaaataagcacagcagctgccattctgttgacgtcagctggagcggctctccgtttttcaaaacggaaacattgtctatatctatcgcaagctggtgaatccggatcaccttattcacagccggctcctctgccgaatattgcgtcgcccgccgtatcgcggcttttactcgggctgtcagctcaatcatcgaaaacggtttggcgatataatcatccgccccaaagcccagtcccaatgccttgtccacatctccatcttttgccgaaatcattaagaccggtatattgcttttttcccggatgattttcagaaaatccatgccgttcagcttcgggagcatgatatcaaggaggaccaaatcgtatgaaccctgctgaaacagccggatgccctcttctccgtcgaaagcatgcacaattccaaagccttcttttgttaaataatgatccaccatttcactgattgagtggtcgtcttctacaagcaatatgcgctgcatctcctcacctaacctttacaaaatcaaaaaacacacacgtaattacacttattgtaattgaaaaacgtgtgtgttttataaaaattattctttttttcctgttttcagcttcctgtattccatgcccgtaatgacaaaaaatacgccaccgcatccaatgacttgaatgagcccgagccgttcaccgagaaataaagctccatagaaaatcgtcaggataggccctgccattgaaatggcggcggctcgctgtgccccgattcgttttatgccctcaagcattagcacaaatggaatcactgtggtaacgactgcaattactgcgaacaaaccatacatagaaagcggatatgctgccattggcgtattcatgccagccgccgattttatccctgtgtaaagcatcatggcagctccagcagctgtcatcccgtatgcattgagacggatccctccgatttgatggacgagatgcccggaaaggacaagataaccagcatagacggccgaagataacaaaatgaatacagctccaatcatattcgcctggaaaagctcagcattccagccgcccagcgccaagaaaagcccaaacatgaccgccagaactgcgaaaaggtcctgaattgaggacattttccggtcacgacacgcggtgaatccaaacacaaacaacggatagctcatcagcaatatacgttcaaccattgcggatacatggttcagcccgataaaatcaagcaagggagacagaaaaaaacaaaacactcccgcgccacaagccttccataggtctccttttttcttaccgtctggcattggaggacggtatattaaaaaaatcagccaaaacagcggaacagccagcagctgcctgtatagcagcacggcatctggctcagcacccatttggtatgcccattttatccaaatcgatttagacgcaaaacaaactgttccgatcagcaaaaaaatcgtacctgctgcggcctcacgaatcttactctgctcttctgctctcatctcagctcagcttttctcctttacttattcaaatgcttttggataaaatcgagaagcgtatatccttgagcagtcagaataacaccttttccgctgcaggccgggcaaggtgttccttcgatttctcccgctctttcacatttaggacatgcgacctcaagatcatcagttgcaatgaccatttgatatcctcctttctaactcatctgctatgccaccaccagccatcgtacattggccgtcacctcctttaagaaacacaaaaaacccccgtcctatgcaaaggacgagggtctcgcggtaccacctttattaacagctatacagccgttcactctaagtacagaaaacctatgtttcgatactcctctcttggtaacggggagagaaacccggcatcgcctactatccgttcagcaaagcaattcagaagcccattcggcatcaggggaggatcggttcacacctgccaccgactctctgaacctccattctgatgcgtacttgctcttcctcacgattgttaatccgttctattatttgtagagtttataatactcggttcatgaaacgaagtcaattcttaatccgatgttacaccaagtgcttccagcgccatattgatgtgttcctcctgctgtgtttgcagagctagcttggcgatttccaccggatacgccgcctgcatctctgagatgtgttcctgcatttttgcccatattcggccgcctgcttgatcatagtattcaagcaaacgggcagtttctttttctccgaaaatggtttgataaagaacaaaatccttggctgagtcagcaaccttcgcttctgtccaatccagaagtcctgtgacacgtccattttgatcgataaggatatgcggcgggtggagatcgccgtgtatcaaagaagagaaacccggccagtatgcatcatcatctatccacttttgccatctttcccaaagcgtcgtagatacgccaagcttattcttcacatcaaccatagagtctgctgtcatttgcctgaaatcttctggccttatcacttctattccggattgcccagcagatatttgatccgtgccatgtaattcagccagtatgccagcaagtgtacggacaaaatcgtctgatggcggctgatgattcatattccaaacatattgcttttgttccaaatcaatcccggccgccggcgttccttttaacattgggtaagcgatcaattccggcgtgtgaattctccaatccggcacatcagcagtcagattcgcgcggagaaaggcaagcgttatgccttctgcagatgctctttccacaacatcacttcgccgcggttttcgcagcacccatggcatacctgtgtcgtccttggcaaatacaacttgaaagtccattccggtttcattcaattgcgcgttctcagaatgaaccgtcaaaccttggctgcgtgcaagcccgacaatctcagtgataagctgtttttcgttaaggtttgtcatcccatttcccctttctcatgctccggcctgcagtagagagaagggatgcttgaaggcacaaaaaagggcaggcacgccaccctcttttttgataaccatataagggctcatacataggcggattcatcccgattctctcgcattcaggcgagagttgttcactattgaattcgtgtcactcggaatctaatgaatgccatgctgtaacccctccgtttcctatacgctgattttcattttacagcatattccatctttccgctataaaaacatgaatcaagtcactggagcaggattaaacaaacacaaatcattatgaaggccccaacggtctgcccacgtttgttttcggccgcttgccacatccaaaatcgttctgaagatttcccagcctacgtcttcgatactggcctctcctgtcgcgattcggccggcattgatatcgattaaatcagcccaatgctctgataaggaatgccgagtcgatactttcagcaccggtgcagcagccaggccatatggtgttcccctccctgtcgtaaacacctgcagattcatgcccgcagccagctgcagggtgccgcacacaaaatcgcttgccggtgtcgccgcgaacagcaggcctttttgctctgctctttcaccagggccgagcacgccggagatggggcttgtgcctgatttcgccaccgaacctaacgctttttccaccacattggataatccgccttttttattgcctggtgacgggtttgcgcttcggtctgcgtctccccgccggagatagctgtcataccacttcatctctttgatcagtgattgtccgacctcttcactgacagcccgcggcgttaataaatgaatggcatcccgcacctctgtcacttcagaaaacaaaaccgttgcacctgcgcgtaccaataaatcagccgcataccccacggcagggttcgccgtcacgcctgaaaacgcatcactgccgccgcattgcaggccgataaccagatccgaaacagggcatgacacccgggttctgctgttcagcctgattaaccgttcctccgccatttccaaaatggattggatcatcgccgcaaaacctcggtgatcctgaagcgatagaatgtcatcatcattttcggaggaaattctttccgggaggagcttttcacatcccaatccgatgaccattacttctccgccgaagttcggatgcttcgcgagattttgaatcgtgcggatcggaatgacagcgtcgggcgcattgatcgccacgccgcatccgtattgatgatgcagcggcacaacgtcatcgacatttgggtatttcggcagcagctcttcttttattcgtttgactgcataatccaaaacgccaacaacacattgaacacttgtcgtgatgccgaggatattttttgtccctgcactgccatccgcatttcggtacccttcaaacgtgtagccttcaagagggggccgcggctgcggcactctgtttgcgagaggaagatcgtctaacgccggaggagcgggcattctcacgagggcttcctgtatccagctcccgcgtttgatcgtctcatcagcaaatccgatcacctctccgtaacgcacgatctcgtccccttgattgagatcggtgagggccaccttatggccttgaggaacatcctcttcaagtacgagcccgcatgagaaaacagtgccctttggcagtcctccatcatttacaataatcgcagtgttatctatttcatgcactttgatgtaaaggggggcttggttcttcctgaggttcatcgccatatgaaaatcactcctcatatcttagtaagcgttttctaaattggttttaaaaaaaccgcagctcttacgtttcaactgcggttgctcaccattatttttcatccattccttttaaaattttgtcacggacaaatttcagatgttcatacatgtggtaatgtgctttgtacggatctcttttggcaagggcgtcgtagatttttttgtgatattcgaccgttacatctctctccctgtacggaatttggctgtcaattttcgcatgggtaatcagcagggactgaatcatcccttcaacgacggggttattagcgcttaacgcaataattcgatggaactctttatccgcttcaccataaagattgtcagtgctgttggcaatatcgtcgatcgtcttctgcaaacgctgaagctcttcctcattgattttttccgcggcaattgtcacgagtccgagttctagcgccatccgcgcttcaatgatagccggaagattatcagtggccaaggcaagcatgacggaaaacggctgcatgccgattttatcgttgaaatatgtgccccctcgtgtttttctcgtaatgacgcccagcgtttcaagtgaactgagcgcctccctaagcaccggcctgctgacatgcaaaatgtccatcagttccatttctgtcggcaatttgtctccggccctcaactgtccgctcgataataaatggacaatccgttcgatgacctgcttggctaatgttttccgattgactgtatcgactttcaaatcttctaaaccttcgtacacgaacaactctcccttcagttgttcaattgtaagacaaaatagtggatatgacaatatttacaatcaaacttatcgcacaagacatggacgcttccggtcaaattcccagttgctgatcaggaactgcattgggatcgcgtcattccgtgcgcctaaattcattttccggtagatctcatgcgctttttccacttgttccatatcaatatcgacgcctagtccaggcttatccggcaccttgacacagccagaagaaatctcaaaaggctgtttcgttaatcgctgcccgtcctgccagatccaatgggtatcaatcgccgtgatccgccccggagccgctgctgccacatgggtaaacatcgcaagggaaatatcaaagtggttgttggagtgcgagccccatgtcaaaccccaatcatggcacatttgcgcaacccgcactgacccttgcatcgtccaaaaatgcggatcagccagcggtatatcgaccgcgtggagctgaatcgcgtgacccatttcccgccagtcagtcgcaatcatatttgtcgcagtcggaagccctgtcgcgcggcggaattcagccattacttcacgagcggagtagccattctcatccccgcacggatcttccgcatacgcgagcacatcttgctttcctttgcataatgcaatagcttcctctaatgaccatgccccgttcggatcaagagtgatccttgcctctggaaaacgtttcgataatgcggtaacagcttcgatttcctcttctccccgcagcaccccgcctttcaacttgaaatcctgaaagccatagcgctcctgtgcgaattcggcaagacgcacaatggcctccggcgtcagcgcttcctcatggcgcagacggaaccacgcacaatctgactgctcatcgctttgatacggcaaggtcgtccgctttcggtcgccgatgtaaaagaggtaaccgagcatttttacttcatcacgctgcttcccttcgcccaataaagccgcgaccggttcctgaagaaactttccaagcaaatctaacaaagccgcttccagtgcggtgacggcgtgcacagtggtgcgcaaatcaaacgtctggtttcctcgccctcccctgtcctgatcgccaaactgctttctgaccgtttgcaatatcgcttggtacgcaccgatagattttccgacaacaagcggctctgacagctccagtgtgcgccgaatatgctctccgccaggcacctcgccgactccctgatctccgctgctgtccgttaagattacgatattccgggtaaaaaacgggctgtgtgctccgcttagattcagcagcatgctgtcatgtcccgcaacaggaatcaccttcatttcagtaattgagggaatattcgatcttttctctttttgaacctgctcttgtatcggtgaactcatgcattttcctccctttataaagcgctttcttaaatattagacaggcaacgattgatcggggtcttgttcttgtttctttaacacgacccgtttgatcggcccgaccagcagcaaatagctgaggatcgccgcaatcgcgttagctccgacaaacacaagcgcgccattgaaagatccagtggcattgacaatgtatccgataataatcggtgttgtaattgaggcaatattgccgaaagtgttgaacaaaccgccgcttaatcctgcacattctttcggagacgtgtccgacacgacagcccaacccagtgcgccgaagccttttccgaaaaacgcgagcgacataatgataacgacgagccatgctgaatctgtgtagttgcagacaatcatactgcaagacagcagcatgccggcaatgattggcacttttcttgcaaaggtcagtgaacggccttttttgagcaagatgtctgacacaatgcccccaagcacgccgccggcaaatccgcacagcgccggcagggaagcgacaaacccagcttcaagaatagacatgccgcgggcctgaaccaaatataccggaaaccatgtgagaaagaaataggtgagagtcgtaatacagtattgcgcgatgtacacgccaatcagcatgcggttcgttaacagctgtttgatatacggccatttcgattctgtttcttgtttgcttttactgtcatccatggaaatcagcccgccgccctgttcgatgtacgcaagctcagcttcattaaccttcggatgttttttcggttcatacaccgtttttagccagatgacagccagaagaatgcctgcaatacccatgacaacgaaaacggaatgccagccgaaagagtgggtaagccagcccattaaaggagaaaaaatgacgattgcgaagtattgtgctgaattaaaaaaggctgaagctgtcccgcgctcggagcttggaaaccatgaggcaacaactctgccgtttccgggaaatgaaggcgcttctgataaaccaaccagaaaacgcagtgcaaacagcaggataatcgctgtgccggcggagaaaaagccaatcgccccttgcagcaacgtaaaaaacgaccagaaaaagatgcttaacgcaatgatagtctttgaaccaaaacggtccagcagccagccgcccggaagctgtccgatgacataggcccagccaaaggcagaaaagacatatcccatggcgaccgagtccaatcccaaatcgtgctggacggaatctccggtgatggaaagcgtcgctcgatccgcgtagttaatagaggtcacaagaaacagcataaacacgatgaaccagcgcacggacgtttttttgcccgccggagtaacactcgcaaagtcttttttcatagtatcttctccttttcaaagtagagaatcatatgctggttgtgataaaccgggaaagagacgcacgcctctttccagcaccattacggcttcacaaaaacagttttgatcgctgtgaaaaagtccttcgctgcctcaccctgttctcgggagtgggagctcgactgcttcatgccgccaaaaggcgcctgcagctcaacacctgcgctttctgcattgatccgaaccagcccggcatcgatttcatcaatgaaagaaagcattcggccgatgttttccgtgaagatggatgcacttaaaccgaacttcacatcattggcgatgttcagcgcctcctctatcgagtccaccttgatcaaggcgatcaccggaccgaaaatttcctcctgggcaattgtcatctcagatgtcacattgtcaaagatggcaggctgaacataatagccgttttgatactttccgttctccagcttttctcctcctattaaaagggaagcgccctcctgtttgcctttctcaatgtatgacaggcagttatcaagctgattcttgctggctatcggtcccatccagacatcctcttttaagctgtctccgattgtaatatcttttgtgcgctggagcagtttttctttaaagcgctcgtaaattccgctttgtacgatgacacggcttgtcgcggtgcatttctggccggttgaacggaaggcccccgttatgacagcttctgccgcagcttcaaggtcagcgtcatcagctacgatgacagggtttttgccgcccatctcaagctgatatttggctcccctcgctaaagcggcttgcccgatgatttttccgacttgatttgaaccggtaaacgtaacggcgtttacaccgtcatgctcagcaagcccctgcccgacaacagaacccgggcctgtcaccaaattgatgacccctgccgggagccccgcttcctcaaagcaggcaatgatcttcgcgcatgtcacagctgtttctgtcgccggtttgatgacaacggtattgccgtataccaatgccggcgccattttccaaatcggaatcgccactgggaagttccacggagaaatcacaccgaccacaccgagcggaacacgggtggtaaacatgagcgcgtctttgtcagtagacggaatgacgtcacccgtttttcgcatgccctctccggcgtaatagcgcagaatggcaatcccccgggctgtttctcccttcgcttccggcaatgttttacccatttcacgcgttgcacaggcggcgatttcctccaagcgctgctccatgatatccgctgttttgtataagtattggccgcgctcggcacccgtcagctttctccaagccgttttggcttcattggcggcggtgacggcacgttccacatcttcagccgttgaattctgtacatatccgacaatatcattcacatcggcagggttttcgactttgaccatatcgcctgattgagacttaacccactctccgttaataaagttgaggtacgtgttttgttccgtgatcacagacatgcccattgcccctttcgtgttttttctggtcaaaccgtcgcggcttttttcggaaaacggtcagccgcctgcttcaaaattgcttccaattgctgataatgatctttttcaaccgggccgacaggcggtctggctgtattccttacattcaaacccatgatttccataccggctttaatcaaggatacggcgtagccttttcgttgtttgcgaatgtcgttgatcggcagaatcacatgccgatagagttccttcacaagctcgtcatttccgtttttcaatgcatcatagaacattcgcgaaatatgcgggatataatttgaaatcgctgaagagtaagagtggaacccgatcggcagataagccggcatcgtcacttcagccatcggcattccgttgagccatcccaagcggtcgccgatcgtatagacgagattgatattcaaatccatatttcctaccccgtctttgacaccgacaagctgttcacattcggtcagacgtttgatctgttcaacagagagaactgcgttatcgcgctgataaagaatcgcgttcaagtcagtgctttcaataatcgttttcgcatactggtacagcccctcctgttcgccatgcaccaaatacggaggcagaatcaagtagccgtcggcgccttttttctccgacagctgcgcccaatcaagcgctgtgctgaggttgccgcccacccccgtgtagaccggcacctttcctccggctgccgagactgcgacttccaccatttgctcatattccttctggctgagagattggaattcaccagacccgcaagcgataaatatcgcttccaagccctcattcagcaaaaactcaatgttttgaaaaagagcttcttcctccagttttccttgtgtgttaaaaggagcaaccggaaaacctaaaattccagcgggtgcttttctgatacggctcatcaacataacctcctgttatttgtgtatacggcctctatctgtaagcgcttttattaatttttctttcacatccgctccttcccatatatccttttgtttaattgtaagacaaataaacaataagtcaatatctttattttctgatattttataaaaaagcggtaaatcactgtccggccgggattctgcgcagcaaaaaaacagcctggtcagccggctgtttggtttatatccttctttgtttcatcgtctcatgcaaaagctttgcttccaaaaaaaacacgtggatgaattttttcatatttattctagcaggtgcaaggggttttgcatccttggattggagttctttcattttctggctgacaaccggaaaatcaaagaatttcgatgcataggtttcaaattttggattcgaaaaatcagttgtgcccagtgaagcaaaatggtgcagcgaatgaataatcgctctgcggatacgctgctccgaggctttcatttcgcgattgacttccgtctgtgaggctcctgtccccagcttccgtaccgctacttgggtgaatatttgttttagcgaagggctttgtttttcgtgcggctcggattgctcgtgttctgctaaatactgcaggaccgccatgagatcatgtgcgccgccttctcccatcatgcccagctcggacaacaggaatgttcctgcctcttttaaaccgctgtcactcttctgctggggacgcgctttccgttcagtccgattgacaagccggcttagagaatgctgaatggctccaatcgagtgttcaagctcgatccgctccttcaccttttggagaaccgtgacaatttcaatgcggttaatcggcttatggataaaatattcgatgccgagcgagtacgcttccccgaccatttccttcgcctccacttgagagatcattacgattttgccggagtacgtattctggatctgacgaatcgtctcaatgccgtctcttccgggcattaacagatcgattaataaaatatcaatctgcttaaattgcagcatatgcccttccacttggcttccgtcgtctgcttcaccagcagcttccccgagatcttcgtcctcaatgatctgccttaaaattgaccgcaccgcacggtcatcatctgcaataaaaaaacgcatagcttttggttcaccctttctgaatcaaatgccggacaggcagcctgatggcaaacaccactccccgctgctgattatcaaacgtgatatccccttctagctctgtcacgatttcctttacgtaggaaagtccgatacccgtagaaggcgtgccaaattcgtcatattttgaagtaaagcccgggtcaaacacaatgtctccgattttctcggaaatcccggggccattgtcttccacctggaattctaccatactctcatttggcttacggagcctcaggctgaccattccctcttcatccatagcctctaccgcatttgctgttagattattaatgatcgaaagcacgataaatacgtgatattcgtcatgctctccctcgatcgagcagtaaaaatcaatctgcttccctagtgcttcagcgtacttttcattcattcgaatcacgagctgcagcaaatcagaagccctcatataatctctcaaactctcattcgaaatcagttttgaaagccctgcgaatatccgctggttgtcctttttcacttcatgaatctctccggccagtctcaggattctgccgctcagctgaacatccttgcccttcatttcccgatagagctgatacgaatcgtttgtcactttctctgtcgttttcaatgtcttttttaggtgcaccgtttcttcatataaattggaaacgatcatcagcatgtgctcgtgctgctgccttgtctgtttttctctcgattgtgtttcatacagcttcagcacactataaaagctcatcacaataaatgtgtgagaaatcgcaatcaccgcaatgtcagtgattttctcaggcgtaacaaccgtatgaaaaatgagaaattgcacagccagctcgacacaatctgacacaacttcaatcataaacccaatgaaaccgagcataatcggccgttcacggaaacgattggcctttaatatggaaaacagacaggcgtaagtcatataaaagaaaaagccagacgcttgatcatacagaatcggagtcagcccattgtgtcctccgccccataattccagaaagacgcgaaagatgaaaacagccgctccagtcagaaaacccggcagcacagcgggcacatgccgcaacaacgataaaaagaagaaaaaaaccggtgccccaaagctgacccggaattcttcattgaggggataaaatttcagttcaccggccagcggcaccgtaatcagcatgagggccagtatatatccgtctttttcaataaaccgttccagttttatgttgatcacatcctcgctttttattttggggaatcgggagaaaacctgcaaattgcttttgacccagaacatgaggtttttataaatcttactgcttattttcaaaatgtttttgtcgtattttgtatgattctgtagtctccattatacagtaattataccttccgctattatgaaagcgtttaacgcccctttagccttcgttttgatacacctcagtcctttaagaaaaaaatcagtgaggaggaattcgatgaaagaattgataaaagagcaccagaaagacataaatccggcgttacagcttcatgattgggttgaatactatcgcccttttgccgccaatggacaaagcgcaaactatatccccgctttaggaaaagtcaatgattcacagctcggcatctgtgtattggagcctgatggaacgatgatacacgccggcgactggaacgtctcttttaccctgcaaagcatttcaaaagtgattagctttattgccgcctgcatgagccgcggcattccctatgtgctggaccgcgtagatgtcgagccgacaggcgacgcctttaattcaatcattcggctcgaaatcaacaagccaggaaagcccttcaatcccatgatcaacgcgggtgccctcaccatcgcttcgatccttcccggagaatcggcatacgaaaagctcgagtttctttactcggtgatggaaactttgataggaaaacggccgagaattcatgaggaagtattccgttctgaatgggaaaccgcccaccgcaacagagcgctggcctactatttaaaagaaacaaactttttagaagctgaagtagaagaaacacttgaggtgtacttgaagcaatgcgctatggaaagcaccacagaagatattgcgttgatcggcctgatccttgctcatgacgggtatcatccgattcgacgcgagcaggtgattccaaaagatgtggcaaaattggccaaggcattaatgctgacgtgcggcatgtacaacgcttcaggcaaatatgcggcgtttgtcggcgtgccggccaaaagcggcgtctccggcggcatcatggcgctggtgcctccaagcgccagaagagaacagccttttcaatccggatgcggcatcggcatttacgggcctgccattgatgaatacggcaacagcctcactggcggtatgctgctgaagcatatggcgcaggaatgggagctcagcattttttaaacatgaaaaaagaggtgattctatgcagcaaatcctagaacatatcgtcggtattgcaaatgatcttttgtggtcaaagctattaattgttttgctcctttcttttggaatctattttacgttcaggcttaagtttttacaggttcgcatgctgaaagaaatggtcagggtattaagagaaggtgctgcttcccggtcaaaaaacagcatttctccgtttcaagccttttgcatcagcatggcggcccgtgtcggaacgggaaatattacgggcattgctatcgccattgcactcggcgggcccggtgcaatcttctggatgtggattatcgccattatcggatcagcatccagctttgtggaaagcacactggctcagatttataaagtaaaagatgtaaacggcttccgcggcgggccggcgtattacatggaaaaagggctgaacaaaaggtggatgggcgcgctgttcgctgtgttaatcaccttatcgttcggtatcgtcttcaactcggttcaatccaatacagtcagccttgcctttgaaaacgcgtttggcacaaaccgcctgacattgggactcattttaattgctgtattcggcacgattatttttggcggagtcaagcgcattgcaaagctggctgaatccattgtcgtcgtattggctgtcctgtatatcggagttgcgtttttcgtcattttctccaacattacgcagctgccaggtgtgcttgcgctaatcgtgaaaaatgcgtttggttttgaccaggccgccggcggggctttgggcgcggcactcatgcaaggcgtcagacggggaatcttttcaaacgaagcgggaatgggaagcgcaccaaatgccgctgccaccgccacaacaagccatcccgtcaaacaggggctgatccaagcttttggtgtactgacagatacactggtcatttgtacaagcaccgcttttatcattctgttttcggatgcctatcatactccgggtctgagcggaatcgccttgacacaagcctccctcagctcccatgtcggatcatgggcatcaggctttctcgcgattctgattttgttattcggattctgtgctctaattggaaactattattatggcgaaaccaatatcggctttttgaacaaaagcaaaaaactgatttttgtctaccgtatcggcgtgctggcaatgatcgtgtttggctgtgttgccaaagtccagctcgtctgggatcttgctgatttgttcatgggtttgatggtcatcgtgaatttaatcgcgattttcttactatcaaaggtcgtttttacggcgctgaaagactatacacgccagaaaaaagcaggcaaggatccggtcttttataaagatgtgctcaaaaaccataatggcattgagtgctggccggtttcagacacaaagactgacacgcacaacaaacaaatatcataagaaaagggtgttcagacatatgggctgaacacctttctctttttgcgtttattgacaaacacgtaagcctccattacgattttcatatctttttcaaaaaaatctgaaagaaggcatcggtacattctatgaatcctatccaacacatattagatacatacccgcttattgtgctagacggcgccatggcgaccgagcttgaacgcaagggctgtaatttgaatgacagtctgtggtcggcaaaaatcctgatggaagagccggagctgattaaacaagttcatactgattattttgcggcaggcgccgattgtgcaatcaccgccagctatcagtctacatttgaaggctttgccgcacgcgggctgagcgaagcggaagcacgccggctcatcgagttgtccgtcagcatcgcagctgaagcacgtgatgaattttggtcgcttgaagagaaccgtttgaatcggccaaaaccgatcattgcggcttctataggcccttatggcgcttatcttgcagacgggtctgagtatcgcggcaactacgcaatatcagaagatgaactgattgaatttcatcgcccccggatgaaggcgctgattgaagccggagctgatgtattggcatgcgaaacgattccgtgtctgactgaagccaaagcgattgttcggctgttgaaggaatttcctgaaacgtatgcatggatcagcttcagtgctaaagacggcttgcatatcagtgacggaacacctgcagctgactgcgcatcgtggcttgatgaacaccgccaaattgcagcactcggcatcaactgcacgccgcttcagcatatcccttccttgatagaggagttaaaaaagaacacgtcaaaaccgatcattgtctacccgaattcaggtgagcaatatgatccggaaacaaaaacgtggaacggcgcagcatgcgcagaatcttacggggcgagcgcccgcacctggcatgaaaaaggagcgaggctgattgggggctgctgccggacaaaacccgaaaatattcaagaaattgcggcttgggcccgctctttaaaaacaacttgacttatcggaatagtttgtatattctaacttaaagccggttcgccggagtctcgtgtcactttctgacatgagattttttattaggaggaaataaatcgctgatagaaagttggaaaaagatgaactctgcccacaacaagaatgagacaacctttcagagaagtatgaaaagccggcacctctttatgctttccttgggaggtgtcatcggaaccgggctgtttttaagctcaggttataccattcagcaagcaggcccggccggaaccatactcgcctacctagtcggggccggcatcgtctatttggtcatgctatgcctcggtgagctgtcagtcgccatgcctgtgaccggcgcctttcacacctatgcagccaaatacatagggccgggcaccggatttacggtcgcttggctgtactggctgacatggaccgtggcattgggatcagaattcacagcagccggcctgttaatgcagcgctggtttccccatacatcggtttggatgtggagtgccgtctttgcgctgttcattttcttgcttaacgcattttcggtcaagtttttcgctgaatcagaattttggttttccagcatcaaagtattagccattgtattatttattcttttaggcggctctgccatgttcggcatcatcccgatcaaaggcggagaagccgctccgatgctgtccaacttcaccgcggaaggcgggctttttccaaatggatttgtcccgattttgatgacgatgctgtccgtcaattttgccttttcgggaacggaactaatcggaatcgcagccggtgaaagcattgatcctgacaagacgataccaaaagcgattaaaacaacggtctggcgtctctcactcttctttgtcggaacaatttttgtgctgtcaggactgattccgattcaagatgcaggtgtcatcaaaagcccgtttgtcgctgtctttgacagagtcggtgtaccatacgcagccgatatcttgaactttgttatcctgacagcgatcctgtcagcggctaattccggactctacgcttcttcccggatgctgtggtctttatcaaaagaaaaaacgcttcatcccacatttgcaaagctgacgtcaaaaggaaccccttttaacgcgctggtgttcagcatgatcggcggcattctgtcattgctgtccagcgtatttgcgccagacactgtatacgttgtgctcgtgtcgatttccggttttgccgtcgttgtcgtgtggatgggaatcgctgcttctcaattcatgttcagaaaacgttatatcgaagcgggaaacaaggttactgatttgaaatacagaacccctttgtatccgttcgtgccgattgcagcgttcctgttatgcctggcttccgttgttggcattgcctttgatccgaatcaaagaatcgcactctattgcggcgttccatttatggccatttgctatgcaatatattatgtaaaaaaccgcaaaagccagccagctgctgatatgactcattcaaaataaaaagaacctgcctccgggcaggttctttttcgattttcacacttccactgtccagttaaacgggcccttcaccttgccaagctgaatatctgttatcgtttcatacagctttttcgagaggtccccgatttgcccgtcgcctacaatcaccgtttttccatgaatgttgagttcaccgacaggcgtaacgactgctgccgtgcctgtgccgaagacctctgtcaattctccgcgtgcagaggccgcatacacctcatcaatcgatattctctcttcacgaaccggaatgccccagcttcgaatcaattcaatcgcagacgcacgtgtaaccccgcttaaaatgcttccgcttaaagcaggtgtgacagcttccccgtttatgacgaaaaagatgttcatgctccctacttcttccacatatttcttttcgatggcgtccagccacagtacctggtcatagcccagttcattcgctttccgctgtgcctgaagactggcggcatagtttccagccgtttttgcaaacccgactcctccgttgaccgcccgcacatactcatcttcgacatagattctaaccggcttcagctgatcgtcgccataataggagccgacaggcgaaagcacgatcataaatgtatagctcctggatgccttcacaccgagactcggttctgtggcaatgacaaaaggacgaatatacagtgacgttccttttttctttggaacccaatctttctccagctcaactaattgtgtcaatgcctcaaggaccagctcttcgtctaaagggggcatgctcatgcgctcacacgatctgttcagccgtttgatattttgatccggacggaacaggagcaccctgccatcctctgttctgtatgcttttaatccttcaaaaacagcctggccgtaatgaaaaacagatgaagacggatcgagcgtaagcggtgcgtacggtgcaattcttggatgatgccatccaattccctcttcgtagtccatcacaaacatataatctgtaaaatattgtccaaaccccaaggaagacgggtcgggcttttccttataatatacagttttttctcgttcaataagcttattcaatctgatcagcacacctttcatataattgtttaaatattcagtctttttaaagctgcaaaaaacatacagcccttcctttcatgatacgccgcaccacaccgataaatttcagaatattctttaggatcatcagctattatacaccacattcattgtcagatgaagctgaaattaaagaaaacagccagttttattctggctgtttgatttagagcgctaaacaaaggacgacaatgtggcaaatcagcaaaatatacactgcgaatacaaattgccaattgatcttccgcgcccatgcaaacaccaccatcaaaacaggcagcatcacagtccccgccagcttgttaaccgtcagatccggactgttcgcaacatcataatgaatcggcatctgcgtcggcagaaaagggtaaaatacaattgaaaggatgaatgcagcaatcactgctccccacagcacttttccattcgtaaataaaaacatagaaccaccattcccttcttaaaacacattgctttatgaatgatatgactgttctacggtgaatttcgttcggtctccccgtgtaataatttgcgcatattccaccacttcttcatttttatcataggtaagggattctgataaaaacgcaggcgctccgacattggttaataagtgtccgctgatcgtttcatccgttaaaatcggttcgatcgattccgtgcccctactgatttcaatattgtattttgtccttaacaattcaaacagcgagccggtgcattcctcctgcgccagccccggtgccgccttccagggaatatatgaggtatgatactgcaaaggttccccctcggcgtatctgactctgacaagcttgttgacaggttcattctctttcattttcaaaagctcggcgatggaatgatcggcaggaatcaccacaagctcaagcacttttgattcagaacgaagtcctctcatttgttctgcaaagctcgtaatcttatgcggaatcggcgtttgtattttggccgccgatacaaatgtcccttttccttgaattcttttaatatatccctcaagctctagctgctgcagagccagtctcacagttgttctgctgacatcatattgttcgcaaaactcactctccgtcggcagctgatcattcgcctgatatttgcccgatttaattaactcaatgattttaaacttgataacagaatataaagctgtcatttcattctccccattctgtatgcaatccgttctttttcattgagaccataataccatttgccctcccaatatgaaagatttgtatccttcttttataacaaattttcagaaattaatattgacagtttgataagggcggtgctaaattcgtaatgacaagtatcataaattggtcataacaaatatggtgcttgtctatctctttgagggggtgtcacatgaagattctgatcgccgagcactacgaagaactctgtaagttaagcgctgccattattaaagaacaaatacaagctaagaaagatgccgttctcggcctggcaacaggaagcacaccggtcggcttgtataagcagttgatttcagactatcaggcaggcgaaattgatttttcaaaggttactacatttaatttggatgaatatgctggtctctctccatctcatccgcaaagttataaccattttatgcatgagcatctttttcagcatatcaatatgcagcctgatcatattcatatcccgcaaggagacaatccgcagcttgaggcggcatgcaaagtatacgaggatctcatccgccaggcgggaggcattgatgtccaaattctcggcatcggcgccaatggccatatcggttttaatgaaccgggatctgattttgaagaccggacacgtgttgtgaagctctcggaaagcacgatacaggcaaatgccagattcttcggcggcgatccggtgctggttccgagactcgcgatttcaatgggcattaaaaccatcatggaattcagcaaacatattgtgcttttagcaagcggcgaggaaaaagcagacgccattcaaaagatggctgaaggtcctgtcacgacagatgtaccagcctccattcttcaaaaacacaatcatgtaaccgttatcgccgattataaagcagctcaaaaattaaagagtgcatcattctcataacacaataaaaggagactgtcatgtttaaaaaggcatttcaaattctgcagcagcttggccgcgcgttgatgactccggttgccgtcctgccggcagcaggtcttttgctccgtttcggagacaaggatttactgaacatccctattataaaggatgcgggcggcgttgtattcgataaccttccgctgattttcgccgtgggggtcgcgatcggattagccggcggagaaggtgtagccggacttgccgctgtcatcggatacttaattttaaccgtcaccctcgacaatatgggaaaattactcggccttcagcctccgtatgaaggagccgagcacctgattgatatgggggttttcggaggaatcattatcgggcttctcgccgcctatttatataagcgattttcatcaatcgagctgcatccggtccttggatttttctctggaaaacgctttgtcccgatcattacttccgtcagttcattggtgatcggcgtcattttctcattcgtttggccgctgatccaaaacggaattaacgcagccagcagtttaattgccgattcaacagtcggcctgttcttttatgcaacgatctatcgtttgctgattccttttggcctgcatcatattttttatacgcctttctattttatgatgggagaatacacagacccatcaacaggcaacaccgtaaccggcgacctgacaaggtttttcgcgggagacccgacagccgggcgctttatgatgggggatttcccttacatgattttctgtctgccggccgttgctcttgccattatccataccgcgcgtccggaaaagaaaaaaatgatctccggcgtgatgatttctgcggcgctcacatctatgctgaccggaattacagaaccggttgagttttctttcttgttcgttgcgcccgtgctctatttgattaactctattcttgccggcgtcatctttgtcgtttgtgatttattccatgtccgccacggctatacgttctcaggcggaggaattgactacgtcttgaactacggactgtctacaaacggctgggttgtcattcctgtcgggatcgtgtttgctttcatttattattatttgttccgatttgcgattctgaaatggaatttgaaaacgcccggccgtgagacagatgaagacggtcagaatgaggagaaagctccagttgcaaaagaccagcttgcctttcacgtgctgcaggccttgggcggacagcaaaatatcgctaacctggatgcatgtatcacaaggcttcgtgtgaccgttcatcagccaagccaagtctgcaaggatgaattaaaacggcttggtgcagtaggtgtgctggaggtcaacaacaacttccaggcaatattcggaaccaagtccgatgccttaaaagacgacatcaaaacaatcatggctggaggcgtccctgccaccgccgccgcgctggacacggtaactgacaaaccgcagaagcccgattccggtgagacctttatttattcgattaaaggagaaacagtctctttggaggatgtgcctgatcaggtcttttcagaaaaaatgatgggcgaaggatttgcgattataccatcagaaggaaaagtcgttgcacctgcggacggcgaaatcgtctcgatttttccgacaaaacacgccatcggctttatgagcgccggcggcactgaaatcctgattcatgtcggcatcgataccgtcaaactgaatggggaaggctttgaagcacatgtcacaagcggacaagccgtcaaacaaggcgaactgcttctcacctttgacctcaattacatcaagcagcatgccgcttcagccataacaccggttattttcacaaatacctctgaagaagatctaaagcacattcaaatgaagtaaaaaagcctccctgctgcgggggacttttttaccaacataatgaaagcgctatcaaaataaaataacttgaaaaaaggtgtttgcatttgaatcacgaatgatatgaatatgcctacattctatcgttctaaagggggattcatttgaaaaaattaatcgcgtttcaaattttaatcgctttggctgtcggcgcggtgatcggccacttttttcctgatttcgggatggcactgaggcctgtcggagatggatttatccgcctgattaaaatgattgttgtgccgattgtattttctaccattgtcattggagccgcaggaagcggaagcatgaaaaaaatgggcagcctcggcatcaagacgatcatttggttcgaagtgattacaacgttggtattagggcttggacttttattagcgaatgtcttaaaaccaggtgtcgggcttgacctctcccatttggcaaaaaaagatattcatgaactttccggctacacagacaaagttgttgatttcaagcaaatggtcctggatattatccctacaaacattattgatgtcatggccagaaatgatttgcttgccgttattttcttcgccattttatttggtgtcgccgcagctggtatcggcaaagcttctgaaccagtaatgaagttttttgaatctaccgctcagattatgttcaagctcacgcaaatcgtcatggtcactgctcctatcggcgtgttagccctgatggcagcttctgtgggccaatatggcattgaactcctcctccctatgtttaagctggttggcaccgtattccttggcctgttcctgatcctctttgtcctctttccgcttgtcggtctcatctttcagattaagtatttcgaagtattgaaaatgatatgggatctgtttttaattgcattttccaccaccagcactgaaaccattctccctcagctgatggatagaatggagaaatacggctgtcccaaacgagtggtatcatttgtcgttccctccggcttgtcattgaactgtgacggctccagcttatatttatcggtttcttgtatctttctcgcacaggcctttcaagtagacatgacattgtcccagcagctgctcatgatgcttgtgcttgtgatgaccagtaaaggcattgcagctgtaccctcaggatcgcttgtagttcttctggcgactgccaatgctgtaggactgccggctgaaggcgttgccattatagcgggtgttgaccgcgtcatggacatggcgagaacgggcgtgaacgtaccgggacatgcgatcgcctgtatcgtggtatcaaaatgggaaaaggccttccgccaaaaagaatgggtttccgcaaacagccaaactgaaagcatatagaaaaaaagaacacctcaatacgaggtgttctttttttattcagcagcagcgtgatcttctgtttcaatcgctgccagtcttgcgtttacttcttcttctgtcatattatgctctttcacatacaggtttcttgggttcgtgcggcattcgtggctgcagctgcgcatatatttatactcattttccggtgtgcatatcatttttttattgcaagatggatttgcgcagttcacataacgctcacacggttctcctgtaaagtagtccttgccgacaatcacatgctcgacacggttgacaggcacgctgattctttcatcaaatacgtagcactggccgtcccaaagcttgccttgcacctctggatcttttccgtatgtcacgattccgccatcaagctgagctacatcttcaaagccttgcttcaccagccatcctgagaacttttcacagcgcacgccgcctgtacagtacgttaaaatctttttgccttcaagcatatctttgtgctcttcaatccattcaggtaattcacggaaggcttcgatgtcaggacggaccgcacctctgaaatggccaaggtcatactcgtaatcgttacgcgcgtcgatgacaattgtgtttggatcctgcatcttctcataaaattctgcaggcttcaaatgctggcctgttgtttcgttcggatcgacatcatcttcaagacgaagcgttacaagctcttttttatggcggacgaagatttttttgaaggcatggccttctgcttcatcaattttaaataccatgtccgcaaagcgaggatcagctttcattgtttccatatatttttcagtctgttcaaccgtacctgataccgtaccgttaattccttcagaagaaacaaggatacggcctaacaaaccaagctccttacaaaaagccagatgctgctctctaaacgcctctggatcttcaatcggaacatatttatagtaaagtaatactctgtattgtttttccatgttttaaacaccctgttcaattatagttagttgctatgcacactcttactatatcatacaggaaaatgccgcaaagatgaacagatccgcccagactgataaaaatatccaagctcttacaaacctaagcagcacaagggtttattaataacaaatagtattttccattaactcactaataaaagtagttgtctgaaaactatttttgtagttcctcttcaaaagataaatttaccggttcatctaaaagttctcccggcatttcaaggtttgttgaaggaacgctctcatctacctcttcaaaaacaacatgatccatccacacctgacccggcccagataattgaacgccaaaagatatcacagcgctattttctgggacatctaaaacgatagcataatgattccaattggttgttccggtaataggtctgttgctcatattatcaaattggagaacatcatcagcagcactgtcaacccgcatccaaagtgaggcaaaatgctgcaccccctttgttttgataaaacttgatagacgaagcctttttcctagatagcgatctgctttgaattgctgcatcatcgtcgcaaattcaccgatatcctgaaccatcgttgactttaaataccctgaagcttttccctgatgtacattttcccggtcaatccccatttcgaattggaacggatggctcccgctcaatacccagcctttcatttttttctccatgtaagattcctccttttttgaagtaaagcgtttcataaatgttcggtatgctcctggcggcatgtgatacatctttttgaacgtcctcgtaaatgcttcttgagattcaaactgataatacaaagcaatatcgataatacgatgatctgtataaagcaaagctgccgccgcattcgcaagacgtcttaaccgaatataagaagcaaccgacatgccgacttctttttgaaaaatccgatgaaaatggaattttgaaaagcttgaaacgttaacaatatcctcgtttgatatttgctcatgtaaatgtgattcaatccaattgattgttttctggacagctttttcataatacattgcacgctccaatctcctttctgttttagaataatggatcacggattatatgttttgattatttttgcgatatgtaaaaatcccctgtttaccacaggggacaccgctcacttgataatgacagagggcgtgatatgctccagccaaatgacaccgtcatattgttccttcaggatcatctgctcttccatgtacccccaatagagcgcagtccgcggggtatacatccacgaagtgcctttcttgttttttgtatggagaaaatcaacaaaaacagccggtcggtccgccgctttcagcaaagcttcaaggctcccagacggcggcgggcttgtaaccggcttaacagtcttattatcggagctatcaagactcgcacctgagtaagcataaatgccaatcgtatatgtttgttttttcagccgctccggcaaataatcacccatgttagggccgtttagctgtacccagtcctttatcatcttcgtattctgtttgcgtagatggtaattgtggccccagacaatgattttctttttcggataaagggtgtcggctacccactgaaattgttcagccatcatgcggtctctcataaagaatgaaaaatcctcaatattctccggatactcctctagtttttctttcatttcttccagcatatatgtttccattacgtcaattctcagctgaagagaatgcataaacatctcataagctttcggctcttttggaaggttttcttttagctctgaagcatgtgttttagtgaacttgatcagcttctgatagtttttcacaagcttttccttcttttgcgaaaattcatcaaacgtattgctgtctgtcactaatgttgaaaaatcattttctgattgggagagcaactctgctttctcagggtccaccgcttttacccaatgagtcgcagcatcattgaatgaattcttcatgctttgaatatcaaaaccggtaaggatcagcggatcgcctttctctttttgctctttcatgtaatcaaacaattcaacgacatcttctgtgtgccatacagcgtaaatggagtttttcatcgtgcttttaggggttaattggtccatattaaggtaggatgcatttgtatcaggaaagccagactcaaatgccaatacatcgtatcccagctcttcgtggagatatttgatcattctgacctttgtggcgttgatttcaccagcgccatgtgtcgtttcccctaactgaacgattcgtttccctttcagcaccttctttagaaatcgaaggtctttgtttgaagcattggaagcatccagtggctgtgcatgtcgttcaatccatgaatcccaatatttttcttcagaagcagcacgtgccgagactgaaaaagaagaaaacgccagacagacaatcagcagcggcagagtcattctcactatcattcgtttcaattctatctctccttttctgctaggttctctagtcattacgagatagatatagaaaaagattccttttttcaccaacaaaaaaagcttctctgttgaaagaagctttagctggattctctcatcacctgatgaaagtaaaaccgatacgtatttcgtaaaaatgtctcaaccggaagctgcacatccgcttggtatttgctgatgatgaatggaaaccgctcgattcctttttcgcgcaaattgttcgcttgttcatcatctattgccttctcttgcaaaaccgcttcaatgatcggccagcacacttctcgcacttgccgcaggacggcttcatctccggtgttctgataatctgtaatccagctgatgatttgtttctccataagtctcacctttcttcaaaaaaagaggcgctgcgtttatgcaagctcctctttttactcttcataacctatcagttctccgacttgaacttcttggccttctgctaaatgggcggacggctggaacgcgtctttttcaaaaatcaaaatgacggttgagccaaatgaaaagtatcccagctcttcgccgatctccaattcagtacgggtattcgtctgcacgatagaattaatattcatcgcgccgacaggaatcatcaggacatttcggctgccactattcagctcgtacacaaatcggtaatttttcgacagcacatctttcccgtattttaagcctaattgatttaccgggtatgagcgatttccgagctcggccagcttttgatacctgcagctaatcggagaatggaaacggtgataatgcctcgggcttaaatacagcacgacgaagtatccgccgttgtattgatggtctgcgcttttacagccggtcagttcagcgaatgagtaatcttttcccttcaccgtaaaggtttgattcgggttgatgattcctaccgtctgaaccacaccgtcaacagggctgaccaccgcatgcgcctcttttgacacagggcgccgctccagatttatttgtcgaataaacaattcagacagcgatccgtaatcagcagccgtaccgtccacatcatcccaattcagccgaaaatgttttgagaaaagcggaatgaccggtttgctgatttttgactcgcaaaatcctttaatcagataggatgacagacgatgattcgtcagctctatcaatgatcgatacagaatctttacagccgtattaaacatgaataatccctataacccttccgattgtaataaaaacaaagcaccataaaaaggcgccgattgccgcaaacgcaacatacgttttcagatccattttgccgatccccgaaaagtagcacgtcacatgtctgacgccgggaataaaataacctaaaataagagaatatggaccgtatttcttcatccatttttccactttcatcattcttttttcttttaagccgacccacttgccgtacttgtcgataaacgggcgtccggcttttctgccaatcatgtagctgatcagcatacctaacaaagccccgacaaaactaatcaatatcgaaagctcataattcaacacatcggtatgcgtgaaatagccaacaacggtcatcattacttcatctggaatcggcaatcctacaatccctaataccaacatcaaaaaaatagcgagataaccgtaatccgctatgagctgctgaactaattccatctcccagactccaggttttctgccgcatgttttttaaaatgagggaattttattttactcaccatcaaatatgagagtccgcaagtgccgattgccagaaggatcgggttataggtgaagcttaaaataacgagacacatgcccgcaaacggaatcggcataccgataaacgtcgggagcttgctttgttcaatgttaaatttagagaggcgaagcattccgcaaatgctgtacgtcaatgcgcataagatcccgataaatggcagggtatacaacgcgacactgtaagcaagcatagaaggagccaccccaaacgtaaccagatcggcaaacgaatccagttctctccccatatcagaaacggcattcagcttacgagcagccatcccgtcaaagaaatcaaggaacatgcctgtaaaaataaaaagcactgctgaatgaatgttgtgatatagcaaggaatgaatcgccagcaatccgcaaatgaagtttcctatcgtaatcatacaggggatgtaattcacagtgtaaccaaacctccaattgtaaaaccatctatattatttgacgatagtgatcgaatagcgttacaggaaaaatttttctccaataagcatgataacatagaatgctcacaaaaaaagcagcattcaaattctattattatacaacatttgttaccttttgaaaaatgaatgccaatcttttcatgttccttactattttattcccccgcataaaaaggacaagacgcgttgattgacgtactctgactgctccagagataacagatgtccggcgttctttacgatttcagcctgaattcccggcaccaataccgaagcccgctcaaaggccatttgctgatggtacatggcctcgtgctcaccgaacatcagcagtaccgggacttgtatcgatttcaattcctggtctgtgaacacgtacggaaagccgttttctgtcggcttcaggctcctttgctcatcctgccattccacgcccgccacaatttgtctttgcagtaaaggatgcagatcataactgtcgcctgtgatccacttgatatatgattcagctcctcttgcccctgtaagctctgcagcgtatttatagacatccggatgaaatgaaataaacgcttcagcgggactcataacaaccgcccgctctactctttcaggcgcgcggagtaagaaattcacgatatgggacccgccaagcgaaaggccggccaggtgtgccgtctcaagtccaagagaatcaaagacatctttcatccattctgcaaaatcagctctcgtttccatggctgatgatggtatacttttatttttgtctcctattatatcgaccgcatatgtacgaaattgactgctccacgctgcgatattcggataccacatcgcagagctgaaaaggcctccgtgaagcaaaatgagcgaaggtgcgtcctttggcccacttgcaatgatatgtgtttttccaaaacgagtagaaacatagaatgcttccgactcaatcggccacaaagaaaggctttgatcatatgcctggtaaaagcgcagaccactttcaaccgcggcaaactgcattgaatcttgtatcatcttcttctttttcctccgggtatgattgatataaaggataacgccccttttgtctcgtaagaaaaaatacctatttcttattatctcacataataaatttccagtatatagtttggtttcctgcaataaataaaaaaggcagttcccttaaaatcaaggaaactgctattctttgaagactaatggaatggcatgatctttcatatcctctgttaacgagatgtgatgggttactgatgtttcacccttcgtcaacgcgactgagtaatcgccttttctgccggtatcccatttgatatctccgtttttgtctgttttaccgagtatctcgccaatctctgtactcggctcctcatctgaagagggcgctttgacaatcgtcacttgaaccccttcgaccggcagccccttagcatcctccacatgaagagtgacaggaatagtcgtttctttttgagaagaatgcgtctgcgaactgcacccgcataaaaacaaaatagacatgaatatggctaatttgctgtatttattgatttgcccaatattgaatattgttgaatacatcgttcgtcacccttgttcccaagttatatgacgatcctccgttcgtgtgaatggcaatcgctgtctgccctgtatcactgtagtttcgataaacaggcgagccgctttggcagccgtacgtatcggttgtataggtcagcttatacgtttcagcggagcgaatcggctttgtatcagaccacatcgtgccaaaggttttgtcacacgggaatcctgtcactgacgaggaaaggcccacgggactgctgctgtttgtagtccggtagccgtaccagccaaccgtgtttccaggagaaccgtttaatttaatagctccgtaatcataattagtgtctttgctttccgtccatcctttgacggagtaaaacatcgtgcctgaataagtaccgtacggatatgacgaaccattgcggcccggcgcggcagttatcgtcgaagcccatccatgatcctggctgtacacacaatgtccagccgtgacgactgtatttggattgactaaaaatccggtacatccataagtgcttgaagtgttgggatacttgattgacagttgaacggttgctctatatggaaaagatgtcgtgctggagattctggtgcgttcatcagttccgataatgctcgaaggctgtaaggtttgaatatttttctccagttccgtttggccgccgtataacgatttacttgcttttccggttccctcataaggggcggaaacctgttctgcttttgacgtttggtttttcggggcatcagcttctttaccagtattcgatacagaagtttgcgggttctctgccgcttttgccggtacgccaaaagaaaccgctgctgccaaagccaaacacaaaaccgttaagtaagcgaaccattgttttctgaatcttggaactaatttcattttgtcatctccctcctttagtgtcaaccacccgtattgatggaagacttttacattataatcaggtttctgattcttatgataaaacttttatggaggaagaaaaaaataggccttgtaccatgacaaggcctgctcaaactctattttatcgttagctggtccaacgctttcttagcattctctcttgccgtttcaactgtatcagcagcagaaagcgcaactgccatacgacgtccggctttcgttatcggctttccaaagacgcgcatttgagtctttgggactgccagtgcgttttccaatccttcaacagtgtaatccgctaattcttccggcgctttgaggggcctgctggcgccaggagaaagctgtgtgatttctgtaatcggaaagccgagaatcgcccggacatgcagcgcaaattctgacaaattttgcgtcaccagcgtgacaagacccgtatcatgcggacggggagatacctcactgaaatataccctatctttcgcaaggaacagctcaacaccaaacagaccgtatccgccaagctcatccgtgatcgttttcgcaatatgcttcgcttcttctatttgctgctctgtcatatcatgcggctgccatgattcgatataatccccgtccttttgcacatgaccgatcggctcgcaaaatgccgtaccgttaaccgcacgtacggttaagagtgtgatttctgattcgaatgggataaactcctcaacgatcacgcggccgtttttcacccgtccgccttccatcgccgtctcccagcagctctctaaatccgcttcagagcggcagatactttggccttttccagaagaactcatcaatggtttaacgacacaaggaaaaccgatctgtgctgccgcttgtataaattcatcatatgtattcgcaaattcatagccagccgtcgcaagtccgagcgtttctgccgcaagccgtctgatgccttcccgatccatcgtcagcttggcggcacgggcattcgggatgacgtgaaatccttcctcttcaagcttcagcaattcatccgtcgcgatcgcctccacctcaggcacaatcaaatctggcttttctttctcaatgatggctctgatctgctcgtggtccagcatatcaacgacataactgttatgcgcaacctgcatcgccggagcatgctcgtaactgtcaactgccaccgtctgtaccccaagacgctgggcttcaatcactacctctttacctaactcacctgaacctaacaataaaaccttctttgattgatacatctttgcccctcctatctgttccaaaccattataactgaaatatttgaaaaataaatttttattaaagaaaacaaaataagaagatcttactttccctctgccattaaaacgaaaataaatggactccccataaatggaagccagcacagaagatctccgttttccagctgatgtgttatacatctcaaaaattcacgtttggcattcagagtcatgcaaaaaatgcagcacaagcatacatgtcgcacgcgaaaacacactatcaaataaatgttgagtgatatcttcttctatcaaagccgcttgattctccagcacatcatttttttcacactcatctagcactcactctgacatatccactcctgcaaaatgccagccccgatgtcttgttccaagcatcaccagttcctttccgcttctcgcacctccaaattcactatcaaaaagaaaaacgccgtctactggcagaactgcgcagctaatctgacaaacgatgcgccaattcaggctaacaattctctaaacacatttggacaatatgatgtcggcattttgaatctttctcacgcacttgatatcatctcctttattaaccaaccgacccagcattgatttaacgtcatgcatgaatgggaaaactaaatgaagatacacacccaaataattcgcgccggcattaaaaagcacgaataaatgaaacagccaagtttctcattccaaaccggagccagccctgtctctccttgaaagcaagccgactaacaggaagcacggaacaaaatagcgtcatcaatcaatcccgcaaacccaaccgaaacattaatgaacttagctaatgcatttagtctggcaaaacgcgaaaaaacatagaactggtacaagaagctgactagaattcacgccgaagctgacttcagcagcttctcctgcccatgagtaaaataattaaaaagaatcagtaaaaaagaaccgtttttttgtattttttcagttttcgctcctttcctaaattcaccatgttaccatactaatagggagttctagcgaaatgccacagggtgtaccagacagaggccattgaagccaacaaactcagcaatttactgttactttgggcgatcttagaggaatcaatctaagtattagtattaataatcgtcctagagttgaacttcaaagtacactctttaaggttcatagaatcttgacatattttccctgtatggtatgttgttgattgaaggagaggaataaaataatgaagaaacttagaaagctattttattgtaatgttgccctgctactgctcgtgttattgcttgctgcatgttcgggcaataagaaagaagaatcaaaaaatccttcagataatgattctgctttacattctgaagaaaataacgatgagactaaagatagcaatcaaataggcaaggaagaatcgaagccaaattcaaaagattctgcaacaaaggattcagaggaaaattcctcaaaagactctgcaacaaaagattcagaggaaaattcctcaaaagattctgtaacaaaggattcagaggaaaattcttcaaaaggttctgcaacggatgatcattcaaaagaaacatcttcaatagaagaaagaaatgaggggaaaggcgaaaatgacaatgtactgggagaatattcatccgataaaatcgaatatgcccgagtttggctgcagcttgggccaaatcaagatatagatgaattgaatgttcgccatatttcagccggcgaaccgatcaatccaaatgatgactccagtgccagctatccagaagatgtgatccagttggcaggttctcggttagtggatggatcagtaacttacagcggcaatgggaatggcacgattaatgtatacaatgttcctttacgctgggactccgctgataatttagataaagggataatgaagaaagagactgaggacattaagaaaaatacaaaaaaagtgtacgttgatacaggcgacgataagaaaattaagcgactcattgatataatggttattcattaatcattcatcgctaattattgaaacgaaaataccaaacatttttcaatagaaggggcagttcatcaatacattgaaccgcccctctgataaatactatttccactatcaattagaatactttaatacatctattataatacattctacgatcttctaatccattataaccgccattgacccttcgtgttactgcctcaactgatggattagtgtcacatagtgcattcatattgtttgaatgccaccaaaatcccgcactagtccatggataattattagctacataatcaacacctagacttataattttagaatcaccaattgcattggaaaaacgtgtgtagttataacgacctgttaattgaatataacctgctcctttaaattttggaccatcacctggttgagtattgcctagatctgcgcgtccctcgtacgctctccctgatgctaattcttttctccatcgtccagctccggattcatgactacattgactaataaaatgacaaagtctagatctagttgtaatgttgtatctttctaaacaattattcaaatcttgcaacatagcttttgaaatataagagcttgaccatccaatttgatttaactgactctcggttacataagttacagatgaaccaccatctcctttatctggagtcgagttgtcatcttttgtatcttcgttactaccattatcataaactttcaatacttggccgacttgaattttatctgggttgctaatgttatttagtgattggatctctgacaatgtcattccaaatcgttgagcttaaacccagctcaatgagctgggttttttattttatatctgtgccgatttgctttcgtcagtatccattttatcaagcttctgctttttaagttttctaatatttttgaatcccaatacaatcaccagcatgatcaacatgagagtcataaataatcaaaatgcaggttgtacgggagactcatccagactccatccgactgcgattggcaggatagagccgccaatccattggtagcgagcagcatgcctgtcgtttgttcggaaaccggctcgggttgccaaatgggagaaaagatattactgtcattaaaacgattcttggtttcatccggatatgataaaatgtctcagactatatatttgagccatttttttcttcagcattcatcttgcgtaattgataaaaatttattatgatactctttgtatgacaactccttgcctcaatacaatatactcaacgtttccccgttttctccggtcgtttttcttttcattttctcccgtaaaataaaaaaagctcccaatacaatagatatggtgcggataaatttttactaaaaaggagtcgttatatttgaatgatagttttacattaaaacagcaatggttcggcaatatccgaaaagacattcttgctggcattttagttgcgttagcattaattcctgaagcgattggcttttctattatagccggtgtggatccgatggtcggtctttatgcgtcattttgtatagccattattatttctatttttggcggcagacctggcatgatttcagctgcgacaggctcaatggcagtcgttatggtgtcgctggttgctgatcatgggcttcagtatttatttgcggctacgattttgacaggtattattcaggtgattttaggtatcagtaaaattgcaagattaatgaaattcatcccgcgttctgtgatgatcgggtttgtgaatgcgctggcgatccttatcttctcagcgcagcttccccagtttgaaggtgcttcttggagcatgtatgcgatgcttgccgggtcgttggttattatttatgtgctgccgagatttacgactgctgttccgtctccgcttgtggcgattattgtgatgacaataattgcggtcactttccatgtggatgtgcggacggttggtgatatgggcaatatttctagttcattgcctcatttcttaatccctgatgttccgtttacctttgaaacactgcaaattatttttccttattcaattgctttagcgtttgtcgggttgcttgaatctttgctgacagcacagattattgattagatgacggatacggacagtgataaaaataaagagagccgcggacagggaattgcgaatatcgtgactggattctttggcggaatggcaggctgcgctatgatcggacaatctgtcattaatacaaaagcgggcggtcgcggacgtttgtcagcatttgttgccggtgcttttctgatgtttttaattgcggtgttaagtcatgtcgtggtgaaaatcccaatggcggcgttagtagctgtaatggttatggtgtctgtcggcacttttgattggtcttccttaaaaggtctcaaaaaagcgccgctcacggactcgattgtcatggttgtgactgtggttacggttgttgtgacggatgacttatctaagggtgtatttgtcggtgttcttttaagtgccgtgttctttgtggcaaaaatctcgaagctgaaaatcgtttctcatgcagaggatcaaaagcttagaacgtatcaagtgaaggggcaaatcttttttgcgtcagtgactgatcttacgaatgcgtttatatatcaagaggatattgagcgggttgtgattgacttaactgaagctcacgtatgggacgattctggtgcggccgcacttgataagattgttgcgaagttcaaggaacaaggcattgaagctgagttaaaaggtttgaataaagcgagtaaatctctaatgaaacagatggcataaaatagagaagcccagatgaatgagatctgggcttttttatataacatacacttaagcagcattgatataatagagagaagagaaattttaaataggggacttgcatatgatgcttcagaagctgaaccgtgtattggggagagtgatgccgctgttgacgccgactagtgtggtgctgggcgtgctgctgtctcagtttttaaatgggtatgaatgggctgtgccttggatctttgcttttattacgtttgcaggcagtttgagcgcgaactttcaatctttgagacatgcattgtctcatcctctccctatgattcttgcactattcgttcttcatattttcatgccgctttttgcttggggcagcggccatcttatatttaaaggtgatcctttgacgattaccggtttaacattggctgttgtgattcctacggggattacaagcttgatttgggcagcgatgtacaaagggaatgtcggtttgacactttcgattattttaattgatactgtgctgtcaccgctaatcgtaccgctgagtctttcattgctggccggcgctcaggttcacatggatgtgtggggaatgatgaaaggtctgattgtaatggtcgtgattccttcttttttgggcatgctgtttaatcagatgtcatctccagaaagaactgcgtctgtgagcagtgcgctgtcgcctttttcaaagctttgcttgatggcagtgattgcgattaacagttcagcgattgctccttatttcaaatccattgatttgagatttgcaggaatagctgtaacggtattctttatcgcgttaacaggctatgccgctgcttggctgatcggaaaaatgatgaaaaggcggcaagaggaaatagtctctcttatatttacgggaggcatgaggaatattagtgccggcgcagttcttgccgttacgttcttcccgtctcaggttgccgttcctgttgtgatcggcatgctgtttcagcagatattggctgctttgtttggctatatgctgaatcgttttgaattaaaaccaatgttgcagaaagcataaaaaaaccgctcatagggttgagcggttttttccgtatagccattcgagcgcgttgatgaactgtttgcagaaatacttgcggtggtgcaccgctcctttttcaattgaaagatacaactggtcttcagtgaagcctttttcttttagactttgatgaacttgctttgtttttttcagcataagtcgctgaatggattgtttttcacagccttcttcactcccgatagacatgaaaacacgtgcagtgccaggctttaaagaagatatatgaatggtttccgctgcgttctcgtaccagtatgaacctgatatagagcctattttcccgaacattgacggatattttaatatggcgaacattgagatgaggccgcctaatgaggcaccgatcattcctcttgactgcggttccctggtgacgttccagttttcttcgattagcggaatgaactggttcgttatatcagacagatagtgatatcccattccgccgaagtccgtgaaccgatcactgagtgatgcagccggccatggggtgtattcatcaagccggttttcgggttcgataccgatcagcacgagttcagggagcctttgctgttgaaaggcgctttctagtaattcgatttggttttggaacaaagaactgccatcctgcacgtaaacagcaggaaatcccccgctgtctgtgctgtaggaaggagggaggtacagcgtgaacctcctgttgccggctttgtgttctgaaagagatcctttcaagcattctccccctttttttgcttgaaaagcagatataagaaataaggaactccgaggatcgccaaaatgatgcctgcgggcacttctgccggctgaaaaaacagttttccagcaaagtctgcgcttatcacaagaagcatcccgattaaaccgctcagtggcaggatatagcgatgttcgacgccagccagtctccgtgagatatggggagcaattaagccgacaaacgccatgcttcccgctacggagacacaggcgctgatgattgctacacaggcaacgagcaggatggttttttctttatttgatgaaatgccgaggcttctgactgtgtcttcatcaaaacgaatggtgtcgagcaggcgggatttgccgataagaatcggtataaacagcagcatccatgggagtacggctgagatatacgtccagttggcagaccagatgcttccgtttttccacaccatggccatttgatagtcttgcgggtccatttttaaagataaaaacaaagacagggcgctgaatcctgaattgatcgcaatccctaccagaataattcttcctgaatctaaattgcctctgtgccatgcaaatatgtaaatcaggatcgccgcgatgagcccgcctatcaatccaaagagcggcattcccatcgctgcagctatggatgtcacttccttctgaccttggaataagagcataaacgctacaatgccggctcctgcccctgcgttgattccgagaattccaggatcagcaagcccgtttctcgtgatggcctggataacagcgcctgcaatgccaagaccgagtccaataatagcagccatgacaacccgcggcagccttaaatcgaacagcaaaatttcatactgcggattcgggtcgatttgaaaaagagtggagagcagctcagcaggacgaacagaaaatgatccgctcgttaagctgaaatagctgacaacaagaatcaaagcgatgaacaatgcatattttttagccattttgctcccctccttttcgtttaattaaataaaggaagaaaggtacgccgataatggatgttacgacctcaatcggtgtttcaaacggatagttgataaatctgcttgcgagatcacacagggttaaaaagattccgcccaaaagacaggagcacggaatcagcctgctgtaatcagagccgacgagaaatctcgtgatatgcggaacaaccaacccgacaaacgcaatttttccggccagcgctacggcactgccggttaaaatgatgacggaaagcatcgccatgattttaatggtttttttcttttgccctaagcttttagaaatgtcgtcccctaatgatacagcggtcacctttttgctgagagaaatggccattataatgccaatcaggaaaaacggagcggcaagcttcaggaaatccggactcatttgatgaagtctggcactgtaccagaaactgagatcctgagaaatttgaaaataaatcgacatggccgctgataagctgctgagcagcatgcttgtgactgtgccgatgatggcgagctgcacgggggtaaatccgtttggcatcatggcggcaaggccgaatactaacacagctcctaacgctgagccgataaaagagtatatcatcatttcaatcgaagatgattgcgggagcagaaccatgcaaagcgtaatgataaacgctgaaccatctgaaacacccataatggatggcgaagctaaataattgcgcgtaatgccctgcataagcgctccagaaacagcaagggctgcccctatgagcagagcgccggcagcccttggaatccgggaatgccatataatttgatggtctgtgtttcccggatcgaaatgaataagagatgtaaaaacaatatctgtgctaagatgctttgccccataaaggattgaaagcaaaagtgacagcgctatagcaaatggagaagtaatcaatatgatacgtgtccactgttttgaatacatacaaaaacctactctgaattagttttgtgtcaatttttcagtagccgctttcaggaaacggactttgctccaagctgtgccgccttgtgcgagagggtccactgagttgacatacacatgatcttctttgactgctttaaggcttttccagattggatttttctctaaatcttttaaggcatcaggtttatctgcattttcatcatcagaaaattggacgaaaatatggtccgggttcatttcacttaatttttctaatgaaatcagctcttgcgcttttgcagcttttacttcgttaggcgccttaaggcctaaatcaccgtatagtgtggagttgaaatacacctgttcagggtaaatgtaaatgttgccttgtctaattctaatgacaagcgcttttgaatctttcgctttatcgttgatttttgtttttgtttcttttagatcttgttcatagtctgcaataattttctttgcttttttctcttttccggtcagctgggcaagcagcatcatgttttccttccagtttgaagagatatgagaaactgggatcgtcgtgcctgctgtgctgattttttgcagcgttttttccggaaactttgttgaagcaaggataacatcaggcttcatttcaagaatcttttcaatatttggctccattttttctccggttggttcggctttatcagtgatgtctttgaacatatcagggaatttgccggagaatgaaattgcgccttgcggatgaacgtcaagcaatttcgcgtcttccattgattcaacgcttcccgtaatggcgattttgtctgtcggtacagttacttcatatgttttatcaagatattcaattttcttcttctcagatgctgtgccgcttgccttgctggcagttgattcatttttgctgccgcaagctgccgccgtcagcgcgagaagcaagattaataaggtaagagatatctttttcatctatagagcctcctgttcaattgataactattatcaattggaattatagagaatgaacagatataacaccatggacaaattcctgatttatcatggacaatctccggatagtaaagaaacagtttgctgaacgatgcgttcgtgcccgcaagctgagtattcattccacgggtcaagggatagaagataaacacggttatctcgtaccgcgcttaggttttgccatgcttctgtctgctgtaattgctggtagtaagctatggtctccggctctttaaaaagaaaaagcatcatacagtcagcttggtaatttgcgatattttctaacgaaatcgcttgttctgaaggtgtgtcagccgttgttgccgagctgaatcctaaatccccaaagaaaacttcgcggacacttcggttatgtgccagatagaagttttgcttatgcagcctcaaaaagagaaaacgcagcccttgaacgtgctgaagtgtttttttggcggctgttgtctgctggtcataatccgctagccacttttctgcttcggactcctcctttaaaaatgaggcagtttgcagaaagtgggttctccagctttcttctgaaggaaggtacatgacttctgcgatgcgattcaggcgatcttgttcttctggagaaatagaatccatgctgacaatcacatctggttctgcctgcgataacgtgtacaggttttcttcccacttttcattaaaccggtatgcactgagctggacgggtatatctgtcgaataatgctgatagtagtaagacgtccatttcggatgcagagcggccgcaaaaggtatgtggtgaagagggatgagatggcccattgtgccccttccgtatgcggcgattttctttcggcgttttttcatatagcttgtaggtgaacagcctgtatattttttaaagattctgctgaaataaaattcatcttgataaccggtttggtgtgcgatttctttcaatttgcagtttgattttgccatgagccgttttgcctttgtgattcgtgttttcgtaataaattctgttacgctctgtcctgtccattttttaaagctttcactgtagtgtttggcactgattcctgccatttgcgacagctgggcaagcgtgatttttgtatcggcatgtgtttcgatatagtgttttgttttttcgattgctgaatgtgtatccgtttgatcagataaactggcagtaaaaagatcataaatcaggctttgtacttcaatcacacattttagctgagaaagctgagacgattcattccatagtgcggcaagctcttgaagccggactgcaagattttcgatatgtgaaacattcataagcttcagtttggctaattccgattctgtgcacggtgtgtaaatatcttggccggcttccttgatatagctttgaagcctgatcagacaggcatctatatgtccatcggctgctggcataaagccaaaggtctcgttaggcggacaaacataaagtgtctttttttgcagaggattggtgtttgttccgatcgaaatatagccgtttccttttaaatgaaaaatcagcacgaatgaatcggctaattgctgttctgagaagagatcacttgtcttttttagatattcaatttgtatcggttgataaatcactgcattttgcacgagtagaccaccttttcagaagctttcaattgataatcattttcaataaaaattgtaccaaataaatgaaagttttcctatataaagcgggtgggtttttagcatgaaaaaaacccttacttatgtgtaaaagtaagggtctttcgttcagtaagaatatgttacacgtgtaacatacgatgcttacgttctaataaatgagatatttttttcttgttttgctgaattgttggagtgttttttcatagctgtttatgatgccctcaaccgaagttccattttcaatttttgtcctgatccagccgttgcctgccagtttatcgaatgaacctgttgacaggaactcaaaatcctcaggatagagatcgtgtatggttttaatgactgaaagacccgttttaacggcttcaaacttatctctgtctgtcacatagagctgcacaccgtggcaaagcgttccttgatgtttagaaaacgtcggtgtgaaggatgctgccctaaatgttacgcccggcaaatggaggctgtttaatgtttcttcaagttctgtgcttttgataaagggagctccgatcaattcgaatggctttgttgtccctcgcccttcggatatatttgttccttcaatcagcccggttgcaggataaacaaatgtgctttccaccgtcggcatgttaggcgaagggaggacgaaaggcaatcgggtatcgtcaaaatccatttttcgtttccagtgtttcatttttaccactgtaagatcggcatcaatatcaaattctttgttgaacagtaaagccaattcgcctatcgtcatcccatgcttcaatggaatgggatacaatccgacaaatgaggcgtattcaggttctaagattggcccttcaatatgattcccgccttggggattcggacggtctagcaccataaatggaatgccgttttctttagcggcttccattgcgtatgccattgtataaatgtacgtgtagaaacgggtcccgacatcctgaatgtcaaacattagaatatcgacatttttcagcatttctggagtcggttttttcgtttttccgtagaggctgtatacgggaaccccggttttttcgtcaatgtaagagcctacttcgtctccagcctgggcgtcacctcggacgccgtgttcagggccgaataaagctgtcagtttgatatccgggttctcgtaaaggatatcgacactgcttttcagagatgcgtttactccggttggattggtgatcagtccgatacgttttcccttgagctgttttttatagtctggcaagagcgtgtctatcccagtctggactttaggttttttagccgtttgattctttgaatcgggtgaagcagaggcagcggttatcgttccgaacatcatgagccctgtcagaaaagcgaatattgtttttctcatgtgtccctccttattaaagcggtcttcccgttttgatatttaatccgtagccaaatgggtaaagggtgttccctggtttcgtgactgatgggatgttaactggaagtgtgcctttaggttttgcctggccgaaaatcgccatcactccggccggaatattaggttgaagataacggccatttgcgtatcctttaaagccatagactgcaatcagtgcctttgcttcttcgaaattggcggcatcatatgggttgcgcaggctcattaagacaaatggtttgttgtgctgcagtgcggctttcatgacagctctcggaaacacggtggcccatttgcttgaatctgatattgtgtcgtcgatgacaccgtcgttgacgacagggtcatttttgacgacataggagccggttatgatataatcagccttttttacttgttttgcatgctcggccttaaatacttggttggcaaagttcattttgctgagggatacgggtttgattttctttcgcttgatgagatcgtgaatggtttgttcgattgaagcagtttgttcttcgtaaggtgccacaattaagattcggctgccttttttaggcttgaacggcaaagtgtgctgttcattttttaatacagttactgctttttcagctatttttttctctgctttcaggtgctgctggcttcctacgatttttttggctttggctattttttcttttgtactgtcgctgtttcgtgctggatacatgccgcgttttattttcagggaaatgattctttcaactgatttgttgatttgttgttcaggaatatccccgtttttcacggcttctttcaaagcttgaatgacacgtgcgaatttctgttcttctttcattgaagtgactgaggctggcattaatgcaatatcgacaccagcttttacggccatgaccacagcctcctcctgtccgaaatgatctgcaattgccttcatattgagcgcatcggtaacgatgaccccattaaagcccatttcctgacgaagaagacctgtcatcactttttgcgaaagtgtagcaggaaccagaatgtccgatccatcgagtttgcttttgtatgtggtgtcgtcgaaggcagggaattgaacatgggctgtcatcaccatatcagcaccagcatcaattgctttttgaaaaggataaagctcgacctcacgaagccgttcttggccatgggaaacgagcggcagtccataatggctgtcaacgtccgtgtctccatgtcccgggaaatgtttgagggcagacgcgatatcctgccgctgcaaccctttcatcgtatatagaccgaggcgtgatgtcagttctcgattggagctgaatgaccgtacgccgattacaggattatcaggattattgttaatgtccacgacagggctgaaatctgtattgatgcctaaggcagagagctctttcccgatgatgctgccggtctgatacgcattgattctgcttctggctgcgcccagtgccatattccctgggaaattagtgccctcccctaaccgcgttacaatgccgccttcctgatcaatactcagcatgagcgggatttttggacttgccttttggtaatcgtctgtcagttggacagtttgttttgttgtttttacattttctgcaaaaaggatgatgcctccgaattgatatttcttgacgaggctggcgacttcatcattcatttctgtaagggcttgcggagaggactcgccttccttttgccaatttctaaaatcaggcatcagcatctggccgagtttttcatctaacgacatacgattgacaatctgattggcatcgattgaacgtttggatgcagaggcttctgtctgtctggccccgaaaaagcatgaaagaaagagaacggctgaaaggataagcggaaagacaggtctcatagaaacttcctcctatcgtctaatcattcactccatcgcttcataaatcgcggttatgacacttccataactgcctgttgcaaattgatcaccctcaaagacgtttggattttcttccggatcaataactggtgtatgctttttatttgttaacaatgcgatgcctaaattgtatgctggatcaataattgtaactgtccctgtccagccggtatgcccgtaagcattttcactggcatgagggccaaacatccattccatgcttttacttccgttccgcctccagccaagagcgaatgtcgggtctgttgctgaaggtgctgtaaacaggtcggctgttttctgatcaaataaagaaatgtttcggtatgaacctttgtttaacatgacttgcagcagtatggccatatcatctgcatttgagaacaatccggcatgcccagacacgccacccattgagtaaaacgctttttcgtcatgcacctctccttgcagcgtgtttgtgcggatgttagggaattgaataacgccgtcacgtgtattgcccatgcgttcagtagctgcgaaatgtttcggtttaaagcccttttccagcggattgtacaaggtatgcttcagcctgagcggtttgtagagctcttgctccgtgtagacatcaagcggttgaccggtgagtttttcgacaatacatccgagtagcatatatccaatgtcactgtatacgtgctttgtcccggtttgataatcgagcggaattttcgtcaaatattcaatcgttttgtcccgttcttgggaatagtacttgccggctttttccggcgtgtaaaagtaaaagcttgatgggagccctgattggtgctggaggacatcgatgacacgtatcttgtcttttccttttatgaggtcacccggctgatccttgaaacccggcaaatatgcagaaactttttcatagacgtcaagttttccttggctgactaagcgctgcaatgcaaaatttgttgcgtacatttttgtatttgaggctaagtcaaacatcgtgcgggttttcattttggccggacggcgcagcagttctgatccttcgtactttttactgtagccgtatgctgctttttttatgatgcgtccatccttcaccaccacaagaacggcgcctggaaatcctgctgcaatatcccgttctatcatctgatctaccttccttagcttcttcgtcgagaattgtgcagtttctgcatttatgattttcggctcaatcaagttgcctgctgtttgtgcgaaggtttcatttggcgcaaatatcgatagggttaaaatggcactgaatatgaacagtgtctttgttttcacaggctagcccctttctgtgcttctatcccgtttactatccctaaaacagaaacaatttaatcgaactgagaagccatttcatctttatatccgaatgcataggtcaataaaaagccggccgcgtaggaaataaagagcccaacgatatacaggatgatttgcgaaggcaggactagaaaggaaagcggcagtccggagacaccaatcgcaatggtggctacttgaaaatacgcttgaaaggcaccaccgattccagctcctaaacatgctgttaaaaacggacggccaagcggcagcgtgactccgaaaataagcggttcaccaatgccgagcagtcccgatggaagcccgccggcgattgctttcctcagtgttgtttttttcgtcttcacgaaaacggcaaaggccgcgcctacctgtcctgcacctcccatagccaaaatagggagcagaggatcattgccaattgaattgatcagttccatgtgcacaggcgtcaagccttgatgcagtccggttacgacgagaggaaggaaggttgcgcccagaataaagcctgcagcgatgccgccgatgtccaggatggacagaaggccggatgtaatagcatcagagatgaatccgcctaaaggcataaatacgacatacgttacgattccggtgattaacagtgaaacggtgggtgtgacaatgatatcgagtgattgaggaataaaacggcgaataaattgttcggtgtaagcaatgaatatggctgcgaaaaggacgccgatcagacctcccctgcccgggagaagctcttctccaaataaactgatttttgcgatctccggattgataatcaagatcccggccaaagccccaagtgcgggtgtcccgccaaattctttcgaagcgttaataccgacgagaatgccgagataagtgaacagccctgatccgatgactgtcaggataaccgcaatttgtgagtctgcagagagccagcctgcttgaataattgctttggtaatcccagtaattaaaccggaagcgactagagcgggaataagagggataaaaatgctggcaattttacgtaagaaaagtttaaaaggagtggcgttttttcgattgatatcggctttctttttggccgcagcttctttgacatcggcaccttcttctgctgacacgagctttgagaaagcagctgtaacatgattgacgactcctgtgccgaggataatttgtaaggtttcagcttcaacgacccccaatacgccgtcaagctttcttaaaccctgagcatctgctttgctttcatcgtaaggcgtaatgcgcaggcgtgtcatgcaatgcgtatatgaagaaatattggattttcctccgcatagctcaaggattttctgtgcgagatgatggtagttattttctttgctcattaaaacccctccccttcaagatgccttattttattctcatagattgtatggctgctctcgttttatctatataaccggttgtcgtttcatactgctcagccgccatgcctaaaaacaaaacatcaattataaaaagctgggcgaggcgggaggaagtggctgcacttcgaatcaaggcttcattggaatgggctgtatacaaagggacatcagccagtgcggagacggatgtctgactgaattgtgtgaggctgatcgttgtgatgcctttttccttggccatggcaaacagttcaatgatttcctgtgtctctcctgaaaacgaaatggcgaatacgatgtcgtctttatctgcatttgcgattaaagatgccacaagatgagtgtctgtaaacgcggttgcttgtttatgaatgcgaagccacttttgctgggcgtccttggcgacaatgccggaagccccgaggccgataaaatgcacggtatgagctttgagaagcagagaaaccgctcgttcaagctctttgtagtccatcaggtctgaagtatcctgaatggcttgaatggcattgccggccgttttttcggaaatggagggcagcggctcgtggggaacaatatcccggtagccctgaaacgtaggctttgccagatcgcccgctactctcatttttaaatcttgaaatccttttaaaccgagtgatttgcagagcctgatgacggcagcgtcacttgaattggctaaggcgctgatttcgttgaccgtgctttcgattgctttgtggggatgggctaggatataatctgcaagtttgcgctcggatggagggagcttatgcttcattgattggatgatcgctaaaccgcctgtggccattctagttctctccttatcatggatggtaatgttcgattgctttgtcaatgaaaccgtttgcttcatcgagtaatgtctttgcttgtttctgatctgtgcttgttttgagcatgacgattgctgttttgacgtgatgatcggcttgttccagagtgtatctggctgtgtcgtatgaagcgtttgtaaggctttggataatgctgatggcgcgttcttttagttttttgttgctgacgttgacgtctaccatcaagttttcgtaaaccttgccgattttgaccattacagcggtagatatcatgtttagaatcattttatgagcggttgcggctttcatacgtgttgatcctgtaatggcctcaggtccgacgacaacctcaatgctgtgatccgcatccttgctgatggcggaattttcattacaagtaagggcgatggtgtgtgctccgactttgcgggcgtatcttagggcgcctgcggcgtagggtgtgcggccgcttgctgcgatggcaatgacggtgtcatttgaagtgagctgtatgtttcttaaatcttcagctcctgcttcttcactgtcttcaatgccctctgctgcctgtaaaaaggcttcggggcctccagccatgattccgatgacctgagctgggcttacgctgtaggtgggaggacattcaacagcatccatgacgccgagtctgccacttgtgccggcgcctgtatatatgagccggcctccattttgaaacgattcataagcgcagtctacagctgttttgatgtcggggagaacctcttgaacggctgcagcgactttcatatcttcgttgttgatcattttgaggatgccgagagtgtttgctttgtggatttcaactgtttggctattgcgtgattccgttgtgagacggtgaaggtttaatggttctgacatgaggatgccccctgttttaaaatgatatatctcaatattcagtatattcatttctgttatgatatttcaactatgtttttaaatttttgaaattttatttcactcaagactataagaaatgatgaaggatcaactgttctccaagcgggccgattcttcgccgtcctttatcaaggaacccgcttttcatataaaggtgttttgcgcgtatgtttagatgattgacggccaagatgatttcgtcacaccatggaaaatatccgctcacaaaagcgggaagcaaaagcatggcttttttcgcatagccttttccgtgatgcacagcgtttaaagacagggagctgagcagtaaagcaaatggattgttagaataggaagcaagcgtttcttttgatgcatgtaaaatgaaaaaaccgactggaaggtcgtcttttaagatgacaaccgggtatcggtcctgtatgcccagagcctgagacagcacctctttcgggagggaggtaaagcgtttgtcatcgttggtgagcgtgaatgattggagctcgggcaagtgttcaggcttatagaaggataaagaaatgtcttgagtcatggggtgacctccttacaatatgtcgttaagctcgttttccgaaatgacgcggtagcccgcttgttttaacagtgcggcggttactccgctgccggtgatttttttgccagagaatgtgccgttatagataaaaccgcttccgcaagatggactgttttcttttaatatgacggcagaagcgttgatttcttttgcgtaagccaatgttttcgcggcgccttccatatatagttctgtgacgtcttctcctgaagctgtcacgattttcgctgttccattgaggacatcctcgccggtgcctcctatgatttctgcgggttcgcgtggggtagagaagccgccgagaagttcagggcaagccataactgctttcttttcatcgacgagttttctgattttctccgacgctgcgtgagagccgttatatctgcattcaatgcctccaaggcaggaactgactagaatcatattgtttctcctctcttgctttgcttgtctctatcataaaataaatggctttagttgggaggctttttcagttaaaaaaggagttaaaaagtttgaaaataaaaaatttaattttcctctttacaaacagggggtgacctgtatataataacttttgtcagctcgacgagaacacaacggcccgttggtcaagcggttaagacaccgccctttcacggcggtaacacgggttcgaatcccgtacgggtcaccatttggaggattagctcagctgggagagcatctgccttacaagcagagggtcggcggttcgagcccgtcatcctccaccatcttgccggtgtagctcaattggtagagcaactgacttgtaatcagtaggttgggggttcaagtcctcttgccggcactgttttttcaaaattttatgtggaggggtagcgaagtggctaaacgcggcggactgtaaatccgctccctcagggttcggcagttcgaatctgcccccctccaccattattgggctatagccaagcggtaaggcaacggactttgactccgtcatgcgttggttcgaatccagctagcccagtcacagacacctttgatcaaaaggtgtcttttttcttttcggaaaaatcattccaacttctaactgttcagtctgtataataattttaaaaatatgttaaggtagtttattcacgaattaccatctacaccctgccaaaaatttgataaacttattttataaaaaaattgaaaccttttgaaacgaagctcgtatacatacagaccggtgaaggcagaggttagataaatatggaaatgatgattaaaaaaagaattaaacaagtcaaaaaaggcgaccagaatgcatttgcggacatcgtagatatttacaaagataaaatttatcagctttgctaccgtatgcttggcaatgtgcatgaggcggaggatattgcacaggaagctttcatcagagcgtacgttaatatcgacagttttgatattaaccggaaattttcaacttggctttatcgaatcgcgaccaatttgaccattgaccgcattcgcaaaaagaagccggattattacctcgatgcagaggtggctggtacggaaggcttgaccatgtattctcaaatcgccgcagatggtgttttgcctgaagatgcagttgtgtcgctggagctctcaaacacgatacagcagaaaattttaaagcttcctgacaaatacagaacagtcatcgtattaaagtatattgacgaactctcattaattgaaatcggggagattctaaacattcctgtggggactgtgaaaacgcggattcacagaggcagagaggctcttagaaaacaattaagggatctttaagtggggtgatgaaatgagctgtcctgaacaaattgtgcagcttatgcatatgcatcttgatggagatatccttccaaaagatgaacacgtattaaataaacatctggagacatgcgagaaatgcagaaagcatttttacgagatggagaaatccatagcgctcgtacggagcacatcgcatgtcgaagcccccgcggattttaccgctaatgtcatggcaaaattgcctaaggagaagaaaagagcttctgtaaaaagatggttcagaacccatcccgttatcgcagctgctgcggtattcatcattttgatgggcgggggtttttttaacagctggcataatgaccacaatttcagcgtgtccaagcagccgaatcttgtggttcataaccatactgtgaccgtgccagaaggtgagacggtcaaaggtgatgtcactgtcaaaaacggcaagctgattattaaaggcaaaatagacggggatgtaaccgtcgtaaacggcgaaaagtatatggcctctgctggacaagtcaccggtcagattgaagaaatcaatcaattattcgactggacatggtacaagatgaagtctgcggggaaaagtgtactcgatgcattcagtccgaacggagaagagtaaagcgcgttagccgctttgctctttttttgcgggctgagagggctggcacatttcacttgctaaatcgaaatgtggtataatgggctcgctatgtaaagtacatatgcgtaacacgtaaaacacaaaatacgaaatgactgaaatcttggaggacgaggaaatggcttttgaggatatcccttttttgcagtacctcggcaatgccgttgatattctccttgtttggtatgtgatatataaattgattatggtgatacgcggcacgaaagcggttcagctgttaaaaggaattgtagtcatcgtgcttgttcgtatggccagccaatatttgggcctcagcacacttcaatggctgatggaccaagcgataacatggggatttttagcaattattattatttttcagcctgagctgagaagagcgcttgaacagctaggccgcggccgctttttttcgaggagcggcacgcctgttgaagaagcgcagcagaaaacgattgaggccattacaaaagcgatcaattatatggcgaaacgccgtataggcgccttgcttaccattgagcgggatactggaatgggggattatattgagaccggcataccactgaatgccaaggtcagctctgagctgctgatcaatatttttatcccaaacaccccgcttcatgacggtgcggtaattatgaaaaataatgaaattgccgcggccgcctgttatctgccgctttctgagagcccgtttatttcaaaagaactgggcacgcggcacagagcggctgtcggtatcagtgaagtaacagacagtttgacgattattgtgtctgaagagaccggcggcgtcagtgtggcaaagaacggcgaccttcacagagagctaacagaagaagcgctgaaagaaatgcttgaagccgagtttaagaaaaacaccagagacacttcttctaaccgctggtattggaggggcaagaaaaatggataaattcttaaacaaccgctgggctgtgaaaatcattgctctgcttttcgcgctcttgctttatgtggcggttaacagcaaccaagcaccgactccaaaaaaaccgggtgaatctttctttccgacatcaacaactgatgaagcaactctgactgatatcccggttaaagcgtattatgatgatgaaaattacgtcgtgacgggtgttccgcaaacggttaatgtcacgataaaaggctcgacaagcgccgtgaaaaaggctcggcagaccaagaactttgaaatatatgctgatatggaacatttgaaaaccggcacacataaggttgagcttaaggccaaaaacgtgtcggatgggctgacaatctcaattaatccgtctgttacgacagtgaccattcaggaacggacgaccaaaagttttcccgtagaagtggagtactacaacaaaagcaagatgaaaaaaggctattctccggagcagccgattgtcagtccgaaaaatgtgcagattaccggatcgaaaaatgtcatcgataatatttctcttgtaaaagcttcagtgaatttggaaaacgcagatgaaacgattgaaaaggaagcgaaagtgactgtctatgataaagacggaaacgcgcttcctgtcgacgtggagccctcggtcatcaagattaccgttccggtgacaagcccgagtaaaaaagtgccctttaaaattgaacggacaggaagccttcctgacggtgtcagcatagcgaatattgaatccagccccagtgaggtaacggtttacggctcacaggatgtgttggattctcttgaatttattgacggcgtcagcttagatttaagtaaaattaacaaggattccgatatcgaggcagatattccgcttcctgacggtgtcaaaaaaatctcaccgtcaaaggtgactttgcatatagaagtcgatagtgaagcggatcagaagtttgagaatgtccctatcaagactgtagggctgagcagctcacaaaacattgaatttcttgatcctgaatcacaagcgatagatgtaacggctaaaggctctcccacgaatataaataaactgaaaaaatcagatattgaattgtatgtgaatgtttcagatttagaggacggggagcatagcgtgaagcttgaagtgaacgggccacagaatgtaacttggtccttggggcggaaaaccgccaaaatcaagctgacgtctaagaaaagcaatacatcaacgaatgataacagcagcaatacatcagggaaccaggatgacacagataaacaaacaaatgatcaaaagaacaatcagcaagaagatacaaagaacactgataaaaacaacaacgatcaaaaccaagacgaaaataaagatcaaaaccaagatcaggatgaggatgaatccactgcgaattcacaatcctcatcggaataaaaaaggagcgattataaaatgggcaagtattttggaacagacggtgtaagaggtgtcgccaatagtgagcttacacctgagctggcctttaaagtcggacgtttcggcggttatgtgctgacaaaagacaaacaacgtccaaaagtgctgataggccgcgatacacgcatctccggccatatgctggagggagcccttgtcgccggacttttatccattggcgcagaagtcatgcgcctaggtgtcatttctacaccaggtgtatcttatttgacaaaagcgatggatgcagaggcgggcgtcatgatttccgcttctcataacccagtgcaggataacggcatcaaattctttgggggagatggatttaagctttctgatgaacaggaggctgaaattgagcgcctgatggacgaacctgaggataagctgccaagacctgtcggagcagaccttggacttgtaaacgattattttgaaggcggacaaaaatatctgcaattcttaaaacagacagctgatgaagatttcacaggcattcatgtggcattggactgtgcccatggcgcaacgtcatccttggcgacacacctgtttgctgatttagatgcagatgtttctacaatggggacttccccgaacggattaaacattaatgacggcgtcggttcgactcatcccgaagcgctcagcgcgtttgtcaaagagaaaaacgcggatctcggtcttgcgttcgacggtgacggcgaccgcctgattgctgtcgatgaaaaaggaaatattgtagacggcgaccaaatcatgtacatatgctcaaaacacctaaaatcagagggccgtttaaaggatgatacagtggtttcaaccgtgatgagcaacctcggcttctataaggcgctcgaaaaagaaggcatcaaaagcgtgcagacagctgtcggcgaccgctacgtagtagaagcaatgaaaaaagacggctacaacgtcggcggagagcagtcaggacatcttattttccttgattacaacacgacaggggacggattattgtctgctattatgctgatgaacactttgaaagcaacaggcaagccgctgtcagagcttgcagctgaaatgcagaagtttccgcagctgttagtcaatgtgagagtgactgataaatataaagttgaagaaaatgaaaaagtaaaagcaattatttctgaagttgaaaaagaaatgaacggcgacggccggattttggtgcgcccttctggaactgaaccgctcgtccgtgtcatggctgaagcgaagacgaaagagctgtgcgatgagtatgtcaatcgcattgttgaagtcgtccggtcagaaatgggattagagtaacgaagtctattatcagagagtgaacaagacaagcgaggtttacataagataattgtgagacatacggcaaagttgtttaaaaaacaattgaccgtttatgccacatgttgtaaaatcaagcttgtcttgttcttattttctcaataggaaaagaagacgggattattgctttacctataattatagcgcccgaactaagcgcccggaaaaaggcttagttgacgaggatggaggttatcgaattttcggcggatgcctcccggctgagtgtgcagatcacagccgtaaggatttcttcaaaccaagggggtgactccttgaacaaagagaaatcacatgatcttccaaaaaacatgtaggaggggacgattgaaagtccccttgaaatttgactttcttcgtctccttttacaatcttaggaggaagaaaaatatgtgtggaatcgtaggttatatcggtcagcttgatgcgaaggaaattttattaaaagggttagaaaagcttgagtatcgcggttatgactctgctggtattgctgttgccaacgaacagggaatccatgtgttcaaagaaaaaggacgcattgcagatcttcgtgaagttgtggatgccaatgtagaagcgaaagccggaattgggcatactcgctgggcgacacacggcgaaccaagctatctgaacgctcacccgcatcaaagcgcactgggccgctttacacttgttcataacggcgtgatcgagaactatgttcagctgaagcaagagtatttgcaagatgtagagctcaaaagtgacaccgatacagaagtagtcgttcaagtaatcgagcaattcgtcaatggaggacttgagacagaagaagcgttccgcaaaacacttacactgttaaaaggctcttatgcaattgctttattcgataacgacaacagagaaacgatttttgtagcgaaaaacaaaagccctctattagtaggtcttggagatacattcaacgtcgtagcatctgatgcgatggcgatgcttcaagtaaccaacgaatatgttgagctgatggataaagaaatggttatcgtcactgatgaccaagttgtcatcaaaaaccttgatggtgacgtgattacacgtgcgtcttatattgctgagcttgatgccagtgatatcgaaaaaggcacgtaccctcactacatgttgaaagaaacggatgagcagcctgttgttatgcgcaaaatcatccaaacgtatcaagatgaaaacggcaagctgtctgtgcctggcgatatcgctgccgctgtagcggaagcggaccgcatctatatcattggctgcggaacaagctaccatgcaggacttgtcggtaaacaatatattgaaatgtgggcaaacgtgccggttgaagtgcatgtagcgagtgaattctcctacaacatgccgcttctgtctaagaaaccgctcttcattttcctttctcaaagcggagaaacagcagacagccgcgcggttctcgttcaagtcaaagcgctcggacacaaagccctgacaatcacaaacgtacctggatcaacgctttctcgtgaagctgactatacattgctgcttcatgcaggccctgagatcgctgttgcgtcaacgaaagcatacactgcacaaatcgcagttcttgcggttcttgcttctgtggctgctgacaaaaacggcatcgatatcggatttgacctcgtcaaagaactcggtatcgctgcaaacgcaatggaagctctatgcgaccagaaagacgaaatggaaatgatcgcccgtgaatacctgactgtatccagaaacgctttcttcatcggacgcggccttgactacttcgtatgtgtcgaaggcgcactgaagctgaaagagatttcttacatccaggcagaaggttttgccggcggtgagctgaagcacggaacgattgccttgatcgaacaaggaacaccagtattcgcactggcaactcaagagcacgtaaacctaagcatccgcggaaacgtcaaagaagttgccgctcgcggagcaaacacatgcatcatctcactgaaaggcctagacgatgcggatgacagattcgtactgccggaagtaaacccagcacttgctccgttggtatctgttgttccattgcagctgatcgcttactatgctgcactgcatcgcggctgtgatgttgataaaccgcgtaaccttgcgaagagtgttactgtggagtaataaatgtttaacccctttggataagattgtctaaaggggtgtttttatgtccaaaagagaaagaacgtctacagtggaaaaatggattaaagaaggtgatgctacaggactcgactatctatcggccatggctatagatttaagatgtttccacattaggtcggttaacgaggttaaaagtcattaagacttggagagaaactgcttttgcctaactgagttttctgatgttaatacagatataagagagcagttcctcattaagatacgcttttgatagcagttggaatttagcatgctagaaatccgaaaatcgaagagcctattggaatgataacgtgtttttttattgtcaattaataaaggcaaaagaattctagaagtcgcacttacaatgtacttgtgagattaggttttaaagttcatcctttttttattgagtacattccggtttaagttgaaatgattcagtaaaggacacgccataaataaaaggtagcgtatgactcccattttttccatgaaaacgatatttctaagatttcatctttcgtaggctttcgattcatattacgtaatatttttatcgaacgaattagacacacatcatcgattggaaaagctgtcgggaacctaaggcagcgcattagaacataattggctgtccaaggaccgattcctcgtattttaattaagtttttttcagcatctttaaagttcattttcattaatttttccctcgataattctccacttgccattaatctggctattccaatgatatattcacttttttttaccgtcattttaatatctgccaggtcggtaggggttaaccgtgcaattcgttcgtacggtgggaacacccaatactttttaccattccattcaatagaatcgccaaatgcttctacaaattgcttctttaaggagtacgcgaaggctaagttaatttgttgccctaaaactccccaacataaagcttcaaataaatcgggaatgccgatcactcgcaacccataaaattttcgggcaggcattttaagtaatggatctgcttttgccatttcataaaatggagttaaatcgttatcaagatcaaaccattcatgaatatattttacaatctcttcccgtttccactgctcaacaggtctagaatcgtttaggaattgaacaatcatttgtttattattgattacgcttacctgcactaaggaccgaatttccccaatggctataacttttgtaatgatattgttttctatttcatacatgcattcatttttttccctggttaggtagcctaggttcgcattcatgtcgaatgtttcaggtaatgtaatgacgataacatcattgacttcatgccatgtcactttttcattctccttatcttaaataattataagaaaactcacgctggttgaaattagtttatcacataatcatctttactcattttgttatcttgctattacattctaaccaccttatttttttctatttatgaggttatagtgtagttatcaagaatgctaaacgggagtagataaaaatggcccaagatataaaaaacgcgtgtcgaaaatttaaattgggattcaattcaaactgaattagatgagcattgtaaggagaggtgagataaatgccggatagtatcaataacggacataaagagagccatgagcatagaatttcgaatgatgcagaaatgataacagatgaaaagtggcaagccattataaataatgatgcagcgtacaataatcaatttttctacgctgtaaaatcgacagggatattctgtaaaccatcctgtaaatctcgcgttccgaaaaaagaaaatgtatgcatttttccaaacgcagaacaagctctccgcgcaaattttcgcccttgtaaacgttgcaagcccactaatgaaaaaatgcctgatagcgagtgggttgatttaattactgaatacattgataaaaatttcacagaaaaattaacgctagaatcgttagcagatatttgtcatgggagtccgtatcatatgcatcgaacatttaaaaagattaaaggcattacgctggttgagtatatacaacaagttagagtacacgcggctaaaaagtatttgattcagacaaataaatcgattggagatatcgctatatgtgtgggtatagctaacgcgccttattttattactttatttaaaaagaaaactggacagacaccagcacaatttcgtcaaatgagtaaaatggaggaaacgtacaatggaaacaaagaataaaccttccctttattggtctttactaatgtacaagggttggaatttttatattgcttcaactttaaaggggcttgtgtttgtaggttcacagaacaaaccaatcgaggaattgttcgaatgggctaagaaacgctttccaggaagtcttcttgttgaagatgatgataagcttgaaccctatgctgttgaaatcactcaatatctagaaggaaagcggaaaaactttactgttccagttgagtacgccggtacgcaatttcagctagccgtctggaatgcactttgtgaaattccttatggacagacgaaatcctattccgacattgcaaatgatataaataaaccagcagctgttcgtgctgtaggtgcggctattggggctaatccggtattaattactgtaccgtgccatcgtgtaataggaaagaatggctcattaactggctatcggggcggatttgaaatgaagacactgctcctcgatctggaaaagcgagcttcatctgaaatggatgttcctcattgaaagtgaatcatctataatgggttggattcttttagaggaaaataaagaccagtttactgataaacttgacaacttttaaaatttagcatatcttatacgtaacttaataatcgatgccgatgtttatttttccttttaaaatatgtaggcctttagcattcttttcatatttaattttaaatattgataggatgaaaaagcatcctaactaaaaaggaagagaaacataagtcgatttatttgataatcaggactatattaaaggaaatgaaaacatagcataaagtaaagaccaataataaggtagctcttcaaaaaacttcgctgaagttagttgaagtgaagccgacaattttcaggattcaatgatctaacataatcattgaaattttgaagttgtcggcttttttgttggaaaaaaatagagataaataaaaattgaaataaataatagacaaatatgatctgattgaaaggtcttttgaccaataatgagttttaaaaaaaaggagaatttagaatgttagtttcgctgagtttgtcatcattattaacattattttttattatgcttatggcttctgggattagtggactattgtttttacatccgcgagtacccttgagttttgttcgcattcatattgggatcttggctttaccacttttggtttccttactgattcttgccaatagtggtgtgagtggaaatgttggcccttggcacttagattccttagcttgtttaatgactttctttgttcttgcaattggattcatcattcagcgtttttctgtacgttacttaatgggggatcgatcttatcgaaaatattttacgctttttactatcacaacaggagctgcttcaatgacatggttaagtggtgatctccgcttgatggttctattttggggtgcgactcttgttggattaaccttacttattaggttaaacagtgcttggcaagtggctagtgaagcagccaaaatttctggccggttatttttgttaagttggttttctttgttttttgcgatgatatggatttttcatgccacaggtcaatggcagctatcattggttgtaacaaatgaaagtttagctgggctgggagaatgggggagaacagggattcagctattgattgtattagcagtgattattcctgcagctcaatggccgttccaaagatggttggttgagtctattgttgctccaacccctgtttctgcaattatgcatgcaggtttagtaaatgcgggaggaataatactaactcgattttcacctctatttcatggtggtatcgcttcgattatcttacttctgcttgctagcatttctgtattgattggaactggaattagtttagtccaggttgattataaacgccagttagtaggctccacgattggacaaatggggtttatgctcattcagtgtgcattaggcgcctatatagcagccattattcatcttattttacatggtttattcaaagctacgttgtttctacaagctggttcagcagtagggcgtcatgaagtatcggctcgcactaatgaaagaacatcctatttatgggtcatggctggtcggattttatccttagtaataggcgttgttttttggctcgctgctcctggagagggatatcaattcattagtgcgctgatcttagggtggtcattgtccgtttcttggaatcagcttgtcgcttttggagagggccgaattggccgaattgccggcttaactgttttaggaggagcagccctcgtatattttatcattcataaccttttctataagtggctgcatacaaccatttttcaaagtgttcaaccaccaatgtcagctgtcatgattgtcgtatgtctcttattatttggcagtgctttaggtacatgggttgctcgttatcgttcttccgtttttttcgcggtgctctatctttggttagttcgattaggtgaagcaaaaccaaagtcagtagagagtcacccagactaccttaaacaatatatttcataaggagctaatctgagatgggcattacatccgtattaacgaaagataatgtaaaaaagatagatacagatattgatgttcaagaaagggatcttaacgttttcattacatctgccagccgagtgattgcgccactttggcctatttctacatttgctgcacgtaatccgtggatgggacttgaaaaccaaccttttgatcaggttgcaagttggttgaaaaacactcgcgatgttgatatataccctagtgcgtctatgatccgttcagcaaagaataaaggtgagattgatgaagattttgtggaaatggggctgcagcgttggcttgattcacattcttatcacatcccacgggacgtggcagagcgattttgtcatgctgcattaaagttagatcccctgccttccgaccttttatcatcacatgagctggagaaattagtaggtgaatgtagtggattggatcatatcgagaatgtgtttatgcagccactaagttcgtatatagagaatcaagatggtgaaaggctagtcaatatactagatcatcatgtcattaagtggagtaaattatatcttgatgactctcaagcaggctggacaatgcctaatcgtgaggaaggtttctatcgtgcttggcagcatctcattcaatatgatccagcacttagcaaaaagcagcgagaaagggtaaaggattggccgaaagaggcacatttggctttacaggaagccttattcgcactagaaatcccagagtcagaaatccagacttatcttgaaggtcatttactttcattacctggatgggcagggatgatgctttggcgctcccagcaatcgagccacgaacatgcactcctaacagaatatttagcggttcgaatatccatggagtgggctcttataaagccatacttacctttgactaatgaacgatctaagaaaaaaatttcaattgctccccttatagcagcttggattcattggggtgggcttacattagaagaatggtcacagatgacggccattgaacaaaacgaatatttatcatttgcctacagctttgatgagaaacttcgcaagaaactttggttagaagcttgggagcaaacgtacactgatcgattaagccagaagatcatctcgaaacaacgtgaaaccggcggtaaaaaatctgcattagctcaaatagcattctgcatcgatgtacgatcagaaccttttcgtcgtcaactagaaaaagaaggcccgtttgaaacgattggtattgctggtttcttcggggtgccgattgcaacttgtgaacttggcagtaaacacagtcatgcttccttaccgatcatacaaaaaccgcaaaataaaataaaagagttcgcagatgaggatgtattcaaaaaatacaatcaacggaagcaagcaattcattctttaagccatacctttaaaacgatgaagcagaatgcgctttcgagcttactactgcctgagctaagtggaccttggcttactctgcaaatggcagcccgtagctttgtgccaagaaaggcggggcgtttcattcgtaatctccgtgaggcttggttgcgcaaacctgatacaaaactctcgcttcatcatgatactacagaggcagaaatacctgtgggttttactgatgaagaaaaagtgaactatgctcgccaagcattaaaaatgatggggttaacagaaaacatcgcacccttggtcgtgatctgcgggcatggcagtcaaagcactaataatccttattccgcagcccttgattgtggtgcctgcggtggagcggccggtggattcaatgctagagttttagctgctttatgtaatctatcagaggtacgagaagctcttttagctgaaggaattcaaattcctgaggatacggtttttgcagcagctgaacataatacaacagtagatgaattacattggctttatgtaccagagctttccgaagctgcacaagaagcatttgatcaaattgaagccgtgatgccgaaagtgagacatcatgtaaacaaagaacgtctagcccaattaccgaatttccaatcgaagctaaaaaatccgaaggctgaggcaaaccgatttgcggaagattggagtgagatacgtccggaatggggactggctcgtaatgccgcttttattatcggtaaacgtgaactaactcaggattgtgatttggaaggcagagcctttctccataattatgattggaagcaggatgaaagcggtgaactcctagcaaatattattgcaggacctggaactgtagcccaatggattaatttacaatattacgcatcaacggtagcacctcattattatggtagcggaaataaagcaactcaaaccgttactgcaggtctcggcgttatgcaggggaatgcaagcgatttgttagccggactgccttggcaatccgtcatggaatcagatcacgaggcctatcattctcctcttcgtttattgatactcatccaagcacctagagaatatgtagaacggttattaaataatgattcagcatttctgcaaaaagttcaaaatggatgggtccgactggctagtcttgatccagaaggatgttgggaaagctggtaatgatgaatctaagcatttatcaaatggatttgttactcaatacaaaaatgataaacataaggaagaggtgtgctgtatgaatgtaaaccaaaataaaaaagtattatttttgacggatattgaaaacggtttggagcctattttacaagaagcgactaacacttctgcagagaatatgttgactatacaaagctatggtgccggtatttcacatccttatggagaaatcatgaggtctgttatttttgcgatttaccaggaagatgttgaggagatttttgtagtaggaacaaaagataagaagacttccgcaggtaatggactaactcaacttgaaacaatgaaagataaaatacaaacattggattatctttttcaaaattgcaagcctgaatttttaggtggtacggtcgatgaatggctaaatgaaaatagcagtgacaccattgaaaaaagtgttgatatgattcgacatcatcccctagtgccgtcatatgttaaagttagaggtttattcgttcatcataaggatggaaaaccctcaatcgtggagggtcctgatgttaaaacaggtcaagccttacctgatcattgcttgtcatgatgaaatgcaggtttaacttctaaacgcacccatatatggagaaagcagttctaaggagattgtatgagcgctaatttaactgattttgtcacgaaaacaatagaggaaatgaactcgtttgatcgtgaaaatatggaatgtataaaaaaactaattagaaaagcaattgatttttatcatctaaagtcttatgaagaagttgaggaaacccattcaggaaatgttcgatttttgcatgtccactctatgatggaagaaaatatgttatccaaaatgatagtggtcacaagaaacggtaaaactgatttggatattgaaggtgtatatgaaggatatgttgtaagagaatattaatgagacgaaatcacaaatagaatatgccaatttttttgctcaggagatgtattagatatgaaaaagtctaagggttctattgaatcagagatcagtaagtccattactcaatgggagaaggattatcttgggcgggggtctgtatctgttaagactgatatactgcgggacatgatcatcgtcaatttaaaagggattttaacaccagccgaatatgtagtttgtgggtcaaaagagggtatgttatctatcaaacaaactcgttcggagttagtcgaatcaggtatagaaggccttaaggatattatcttaaaaataaccggagaaaaagtgaaaagttttcatactgatttaagctcccggacaggtgaacgagtgatggtgtttaaattatgtaatgatctagagaaaaatttggaaaagatcttataatctaaagaaaataaatgttaagacggtatggaatttgttgtgaattgaacataaagaactgccgattcttttgttttacaattatggtatcattgataacttttattcatatcctaagcggacataaagagatgtcaattcatagtatactgtcttgttattcctgtcgaaagatctaacatccgctgttgttatgagcggatgtttttttacatctattttaaatacatgaatttgatgctggtgattagtcacttgaacaatattaaattcattttaattgaaaacatccttgtcacctgccgggttcccccaagtgtttagtgacatgattatgagaccaatttcgtaaagcttgatgataaatttaagcggtgaacaaaattgatatgctgtcttcagtttcatttcacggaattagctttaattaaatatatccaaaaaacggattgacatatcgaaatataacgatataataatcgatatggaaccaattgaagtattcaaagccttatcaaatgaatcaaggctgcaaattttacaatggctgaaggagcccgatcgtcattttgcaccccatgaagggattgatatgaacacaatcggggtatgtgtcagtcaaataacagacaaattgaaaatgacgcaatcgacagcttctcaatatcttaccatccttttaagagccggcttgattaaggcggagcgtattggaaagtacacatattacaaaagagatgaagaagccattgggaaacttgctgactttcttaaaacagagatataaaaataaacatcaaaagatgtttatttttacaccatacatatcgacatattacgatgtgtttattttttataataacatatcgataattcgtgatatgtttattgataattaaggagtgaatgttttatgtctaacacttggaaaatttatattttagccattgtcagctttttagttggaacctcagagtacatcatttcgggaattttggatcaaattgctcatactctcgggatcactttagctgccgcgggccagcttattaccattttctcacttgtatatgctctttctacacccgtacttatggcgttgacagcaagtatggatagacgcaaattgatgatgtatgccctaggtttgtttgtgttcggtaatgtcctggcttttgtactgcctggttatggatggtttattgcagcgcggatcattatggcgatgggagcaggtgtggtggttgtcaccgcattaacgattgccgctaagattgcatcggaagggaagcagggaagtgccatcgctacggttgtgatgggatttaccgcttctttaatcattggtgttccgcttggaagaatgatagcagtagcattaggctggaagtctgtatttggagcaattgctttgttgggattgatcgcaatggtcgttattttctttactcttccgcatactgaaggggataagcctgtgcctttgcttcaacagcttgctcttttcaaaaaacggaaagtggctatgggattatcaatcactttcttctggctcgggggatattctgttgcttacacttatttgtcaccgtatctcttgaacatctcaggtataaacagcaagctgcttagcggtgttttgcttatatttggaattgccagtttggttggatcaaagtttgggggatatagcaccgataaatggggagtgccctttacactcgttggtgggatgacgttgcatatcgtcacactgattctgctgtcacttgttactcattcctatatcggagtgttggtgattctcatattatggtcgtttgccgcatggtccaccggtccgacacagcaatttcacctggctaccatagaaccggaaatgtcaggtgttttgcttagcatgaatcagtcaatgatgcaattcgccatggcggtcggcgcaggaataggaggggtttttgtggaaaacgtatcattggcctcgattacctgggttggtgcgttaggggttatgattgcaattattgcatcattgatgatttttcattcacaaccgaaacagatgctaaaagatgtcaatcaataatttcgaaagttctaacacccgctcgttatacaagcgggtgtttttttaaaagctcaagtagaaggcacactgaagctgaaagggatttttgccgacggagagctgaagcacagcaagttattatatactaggaagggaaataacggtatggcggaagggttctagcgcttctcgcctgtaagatcattactttgaggatgtgtcatcgtgaatcaaaagacgtacattgaaatgagcaggacatcgcagtacatcaacaaaatgagagagtattcagtgctaattgatggggctgagatgggaaatatcaaagatggagggaggctgcgaattgatttaccgcctggtgagcatgttattcaagtgaagattgcttggtgtacaagcccaactttgaggtttactttagcggaaggagaagtgttgaagtttagatgcggaagtccacttcgaggatggaagttgcttttggcgcttttttctgttttgggccgtcctgaaaattatctgtttatcgagcaggaagaagagaaaaagctttgtggtgactttgttgtgtgaataaataggaataaatagattaaataccctgaattatgttttgtgaaagattgatataagcggtagccttctcaatgtcgttctccttggagaaggctgcgtataagaaattctcggactttgcggatagaccttccgatatccatttcaggattaatgtcttctgggtggagagtccgatttcatcatagtatcgcagtgtttttgttgatactttgcatatctttgaaaattcgctgatcgatagccgagtgatcacctccatgctccaaatgtacacctttccgtaagggcaaagttaaatgtgaaaataaaactgttccaaagttaatcagaaatttattttcatattgtatcctttcagtatcacgtgaaaggagcatcatatgaaaacattatggaaagtcctaaaaattgtttttgtcagcttggctgctttggttttgcttgtatccgtctcggtatttatttatcaccatttccagctaaataaggaggcggcactgctgaaaggtaaaggcacagtagtcgatgttgacggtaaaaagatgaatgtgtatcaagagggaagcgggaaggatacgtttgtgtttatgtccggttcggggattgctgcgcctgcttatgaaatgaaggggctgtacagcaagttttcaaaagaaaataagattgctgttgtagatcgggcaggttatggatacagtgaagtgtctcacgatgacagagatattgatacggtattggaacagacgaggaaagcgcttatgaaaagcggaaataagcctccttatattttaatgcctcattcgatatccgggattgaagcgatgtattgggcacagaaatatcctaaggaaatcaaggccattattgcgatggatattggattgccccagcagtacgtcacgtataaattgagcggagttgacagattgaaagtgagagggttccacctgttaacctcgattggttttcatcggtttatgccttccgctgtatataatcctgaggtgattcggcagtcgtttttaactgatgaagaaaaagaaatctataaagccattaactttaagcaattttttaatgcagatatggagcatgagcttttacagtcttaccaaaacggcagcaaatctgtgaatctgccggcaccaaaggaaactcccgtcttgattttagatgcggtctctgaccaaaatagacattcaaagtatgctatacaaaaccgaaaagactatgaagcgtttgcggctcaattcaatactgccgatataaaggaactgaggggaacacacagtatttatttatatcagcctgatcaaatatataaactgtccatggagtttatgagaaaggttcgctaggatgaagggatatcatattttaatcgtggaagacgatgtgatgattggtgaattgctgcaaaagattttgcagcgtgagggatatcgtgtgatatggaaaacagatggagcggatgtgctttcggtgattcagaaggtggatttggtcattatggatgtgatgctgccgggtgaagacgggtatcaaatgtctgcaaaaatcaaagagctggggctgggcattccggtaatttttctttcggcccgtaatgatatggacagcaagcttcaaggtttacagatcggcgaggattatatggtaaagccctttgatccgagagagctgctattaagaatgcggaatatgcttgagcatcattatgggacctttacgcaaatcaaacatttgtatattgatgcggtaacgaaaaaagtgttcaatgaaagcctgcatgatgaggtattatttactgcgattgagcggaaaattttcttttatttatatgaaaatagagacagtatcctgacaaaggaacatttctttgaatatctatggcaactcgaagatagaaacccgaatattgtcaatgtgcatattaaaaaaattagagctaaaatcaatgatcaagcgggtgagatgattgaaaatatatatggagaagggtatcggctgaataccgttgtgaagaaatgaagcttaagacaaaatatcagttgttattgtttacggccgtcattagtgttccaatgctattgctggcggtaagtgttttgatgtcggtgatttatgacagcatgtttaaaccgatgaatcatggtatgccctttcacaggtcgtttgcgtacccggcaatgatcgttgtatttttgatatcactcttattgttagcttttttattttcaaagtcgattcattctctgttgcataaaatcaatctattaaatcaaaccattcggcatttggcgagtgatcaaagggtgcccgataaaattgaagtgaagcgtgctgatgaaatcggggaactgatcaagtcggtcaatttgttaattgaacggacgacatatcgtgaactggagctgagacagcaagaggaaatcaaaaaggagcttttgcaaaaactgcggcatgacattaatacacctttaacggctctcaggctgcagttattttatttggaagaccaatgtcatggtcaggctgtattcgaatcattgtatcagcaaatcgaatatatctcggaattaaccaatgaattcaatctatattccgctgagacgctggaaagctcttatattgtaaatgaagaagtgcgtctaaacgagctattagaaacagcggtgaaaaagtgggattatttatacagtatgagtgggattgagctgcactataaggcggcagatcaagatgtgatatggatgagcaacgcgttatggatgcaaaggctgtttgataatatttttcaaaatacgttaaagcattcaaaagctgaaaagatggaagtcacgattgaacatgacaatgtttttattcgtgatgacggtattggatttgatcggaatgagagcagtgagggacttgggttaaagattattgaggatacatgcaggctgcttgcgattacttatgagctgcatacaaatgatagcggaacggggttcttgttttcaaaagagtgaccccgctgatgtttttctttctcctataaaatttatataatagggagaaagaaatggggtgaacagcatatgtttaaaaaaatcatcaaaacgattaagtacctctcaagcagttctagtgaccgatatcgcagacaccggcattacagcagcagccggcgcagacattatcgcagctacagcagctcgggcaaaagaagacactacgaccgttatggcggcagtcatcgttacaaacgccggagctacagcagcagttaatccaaaaaagttcttgttccgcttttgggacaagggtttttttatgtgaccgattgaatggcccggtttagatcctcgcgaatggaagcggtgtgctgatactcttcctcaatgcccaataatcttttcagcagcaaggttacttcctttgtcagtgttaattcctccagccaagtgccgtttttcttcttttttcctttatattgagagtacagcaggaataacagcgtttctccgagatcgaagaagtcatcctgttttcgtacctttatttcctccatttcttcaggagtcaattgtttggcaaggccgaaatcgatgaggcagagcctgccgtcattgatgatgatattaggcgttctgatgtcgctgtggaagataaggcgatcatgcaggtattctataatctcaagcagctgcgaaatcagttgtaatgccataagctctgtgaacggctgttttcgaaaaaataataattcttctatattctctccctcaatgaactgcatgacataataagcctgtccgtctatgatgaactcatctatgaagcccggaatttgcgggtggtgaatgctattgagcagttttatttcctgttggaatcggactttctctttttcctttttcgcttttgtcggccgaagctgttttaagacataaggtgtttgagttaggatatcggtgcacaaataaaccaaaccgtagcctcccataccgaggcactcttcgattttgtattgatgatttaagataacgccgttctttagagggcggtcaaatagcagtttttttagaagttttaatgccatgtctgcacttcccttggttgtactgactatagtttaccttctagacagagaataaaaaagagccggatcaccggctcggtataagttaaaactgctttgtcacgtcgtattcataatctatttttgcttttacgttgctcatcgtcgatctggctgtcgctaatgtattatatttaaaactccatacctttgccacactgagttgatctgacaaagagatatcataagaccctgaagtcgagctgtttacaagagcacggcgccattcgttgttttcgctcgtcatgatcaggtggcgtgtatttccctggcttggtgtttgagtggcggttgtctgaactctggttacaatggcatcacgcggtatcccggattggtttgttaaatcaaccttgatcacgctggaatcagaacctgaggggctaaggcttgtatttcctttattttcagcagcgccgctgaattggaatgttccgctgcctgatttgattcggtcttcaattgaaagtgtaaaatacatgtttccggtataggtgcctcgtgacactttcacataaaaggtatccgtcgtgttttgggcgtctgcatttgcataaataaaagaagaaaacgtattagggttaatgacttctgtcccttgagaaacaggtattctattcttatcataaatttcaattttcatccctgtatacgcgctctggtatgtactcctcacgtatactttttctcccttattagctgtaaaagtgaaataggcttcatcttgaccagcttccagtattgttgtatcgatatttttatatttccaataaccgatcggcattgcggtatcaaatgaattgtttcctgtgatagcagtgactccggcagctgatgccgaatacgtaaaggtgaataagacagacagcataacagcgaatggaataagccattttttcaccatgcaaacaacctccttttatttccatcatacataataacgatttaggtgtaaataaatgttttttgaggttaatatatacattatctttgccgataaaaaagaataagagagaatactcgggagggaattcaatgcgtctgaatcggcaatttatccgcactcagctgatggcacagaacatattgagcaagaatgcgcctgccaaacgggagaatgcgactgaaaatccagcggcagttctggaaaaggcatacagcaggcttaagtcacaatcttcaactgggggaatcaatcagttcaattattctaaaaccagcgtgtcgggaaacagcggggcgttcagcaaagtgtatcaatcagcgaatgatcgaacagtgacagacacaggggaagaaacagtgattcaatcccaaaaccactatgaatctgagagtgatatcagaatcaaaatactagatgaaaaatacagcaggatgaatgcgattaataaaacaaagtctgatccattaggctatattaaggataagtaccaaaattcaaagtctccttatttcagaagtgatctgtcagctgcagaaagacaggccgcttacgataatgaaacagaatggttattcaaagggaaggcgcaaaactataaccttcaggatgctgtgtttcggaatgtcacatttcatggggaagtggaagctgagaatgaaaaggtgtatcagcggggacaggttaaccagcagctgcaagtactgttgaatcgaaaccatattcatattccagaggggacagagctgacgtttacaatcacaccgattgactatcaggtgcgggtaagcgggtcagacgatcaggatctgatcaagcaaattgagcaagtgctgcaatctggagacaacagcaaagaactatttttgcacatcatgaaaagccaaagcagtgattcagcacaattttccgaagaggcctatcaaaagtatcaggctgctcgtgagatgtatgaagttacaggctaccatttgaaggatttagaagtgattgatgggcggtacgtcacgcctgagggacgtgacttaatggatgtatataaggaagagcttgaaaaagatccagtgcagaaacaaacggcttcttatgctatatcttactatcgttcagagctcagtaaaatcgcggaagccgggtataatgccattccggatttcatcctttcaattgattacagcaatggatctctgagagatgtgggacaaagcaagagctatgggaccggagataccgggtggcttgaagcattaaagcgtcaaacgggtgtgaattattaggtaagctgttcatgtaggacagcttattttttatgagaatctaaggggtgaattaatcccaatattcaaataattttattatttttatataaaagattttaaaagaagtgaacgattcaaaactctgaacaaaggtgtttgcctgaaaaaaacaattgtattttccagagaaatttattatgatgaaataagtaatttaggagattatataacaattttaagtttgaattttctgattgttatcactgattcatgtgaaggcaagcaggtctgctgttttctcatttatgagtattttgttaggaggaggaagaggagtggcaaataaagaattaaagaggggcctgggcgcgcgccatattcagatgatcgccttgggcggtacaatcggtgttggcttgtttatgggttctgccagcacgatttcatggactggcccatctgtccttctggcttatgcaatatgcggaatttttatcttttttattatgcgtgcgatgggtgaaatgctgtatgtcgagccgagcacaggttcttttgcgacgttcggccatcaatatattcatccgatggcaggttatataacagcatggagcaactggttccagtggattatcgtcggcatgtcagaaattatcgctgtcggttcttatatgaagtattggttcccggatttgcctgcttggatacctggtatcgtggcaatggtgattcttggtgcggcgaatttaatttctgttaagtcgtttggcgaatttgagttttggtttgcgatgattaaaatcgtgacgattatcttgatgattattgcgggaatcggaattattttcttcggttttggcaatggcggagatgcgatcggtttgtcgaacctgtggtctcacgggggcttctttgcaggaggtttctcaggtttcttctttgcactgtctcttgtcattgcagcctatcaaggagttgagctgatcgggattacagcgggtgaagcgaaggacccgcaaaacacgctaagaaatgcgattcaaagtattatctggcgtattttgattttctacattggcgctatttttgtgatcgtgacggtgtatccttgggatgagctcaactcactcggaagtccgtttgtgtctacgttctcgaaaatcgggattacggcagcggccggcattattaactttgtcgtgattactgcggcaatgtccggctgtaacagcggtattttcagcgcgggccgcatgctgtatacactgggtgtcaatggacaagcaccgaaattctttaagaagatttcacgcaatggtgtgccgctgtatggcacaattgcggtgctgatcggtttggctgtcggtgttgtactgaactatatcgcgccgccgaagatctttgtctatgtatacagcgcaagcgtgctcccagggatgattccttggtttatcattttgatcagccatatcggattcagaaaagcgaagggtgctgcattagataaacatccattcaaaatgccgtttgctccttttactaactatttgacgattgctttcttgctgatggttctggttggcatgtggtttaacgatgatactcgtatctccctgattgtaggcgtgattttcttagcgcttgtggtcattagttattatgtgtttgggattggcaaacgcacgcaggccaatttgacaaaaagcgaacaagcagctgaataacgataaaaaagagacattcgcggatgtctctttttttattttttgcgtatggattttccctattttagcaagctatagggtaaagatagcagaaggaaaggtgttcataaaatggatgttacactcggttatttgcgcgaatcactttcgaatcatctagaaaatgaagtctgccagcgtatttgcaagaagatgctggcgaagcgttatgcaaatgaagaggaatttgtaaaagacttagatgataatgaaatgtcttttttgaaccatgtattagaaaaagaaattaagtatgcccagaatgaacaggatcaaaaacgggccaaggaattaaacgaggtgtatgaattactgctttgagaaaggcgggtaagaaatgggagcaattgaacgaagcggatatacatttcagccggagtttagcgttgtccgtcaaaacggagccatccatgtgtaccatcaaggagaatttgtggaagaaatcgaatttgaatttaacggggaatatcccgatcatgatttgattgaagagcttgtgaatcattattgttttgagcatgagatttagagccctgccgtgcagggctcttttatttaggatgtgatcaggccatactttttcaggatatccacggtgatgtttttggcttttgtgccggaatcatcgacattggtgacaaagacataagagccatgctctgttttgatgaatccgacaaaccatcctaatcccatatctgtcaggcgagttccggttttcccgtagagcgtgtaatgatcgccttcctcttgaatcatcatgcgcttgacggttttcattaccggcttgtcaaatggaagctcctcgttagccagtttctccaaaaaagtttcttgttccagcggagatattgtgagcgagctttgcagccaaaactggtcgattcccccgctgatatcctcgttgccgtaagatagagtatgaagccatgttttcattctttcctcgccgatatctctcgctaatgcctgataataccagattgcggattcgcgcatggccgagccaagcgtatggtcgcggttccatgattcgaattcacgcttgaccccgtcccatcgtttaacatcgtattcatctcttacagctttgacctgcaaaccgattaaagcgttcacgactttaaaggtggattgcggagtttgtctttgatttgcccgttttctgttatagacaaatgtctgatccttttgtaaatcgtgaagaatgaaggttccatccgtatccttgaattcatcatcgacattcattctgctgacattcaagtgtttttcatgagcagatgatgctgcgtggacggaaaagccgccgatccctgcaatactcagcacaagcacaacatatatccattttttcattttgttctccccttcgttttgattaaaccttttctctctttcgtttgttcttcctttaaaaaataatcaaaaagcgcttaaatttggttttgtaaacaaatactgttactgggtttatagtcggaagataacgtgaaaatagagggtaaaaaggaaggcagggtaagcggatgaatgagcagattccacatgacaaaagtctcgataacagtctgacactgctaaaggaagggtatttatttattaaaaacagaacagagagctacaattcagatctgtttcaggcccgtttgttgggaaaaaactttatttgcatgactggcgctgaggcggcgaaggtgttttatgatacggatcgattccagcggcagaacgctttgcctaagcgggtgcagaaaacgttgtttggcgtcaatgcaattcaggcgatggatggcagcgcgcatatccatcggaagatgctttttctgtcattgatgacaccgccgcatcaaaaacgtttggctgagttgatgacagaggagtggaaagcagcagtcacaagatgggagaaggcagatgaggttgtgttatttgaagaagcaaaagaaatcctgtgccgggtagcgtgctattgggcaggtgttccgctgaaggaaacggaagtcaaagagagagcggatgacttcattgacatggtcgatgcgtttggtgctgtgggaccgcggcattggaagggaagaagagcaaggccgcgtgcggaagagtggattgaagtcatgattgaagatgctcgtgccggcttgctgaaaacgactcccggaacagcgctgcatgaaatggcgtttcacaaacaagaagatggaagcgagctggattcccgcatggcagccattgagctgattaatgtactgcggccgattgttgctatttcttactttcttgtgttttcagctttggcgcttcatgagcatccgaagtataaggaatggctgcggtcgggaagcagccgggaaagagaaatgtttgtacaggaggtccgcagatattatccgttcggcccgtttttaggggcgctagtcaaaaaagacttcgtatggaataactgtgagtttaagaagggaacatcggtattgcttgatgtgtatggaacaaatcacgatcctcgtctatgggatcatcccgatgaattccggccggaacgatttgcggagcgggaagaaaatccgtttgatttaattcctcaaggcgggggacacgccgagaaaggtcatcgctgtccaggggaaggcattacaattgaagtcatgaaagcaagcctggattttctcgtcaatcagattgaatacgacgttccggaacaatcactgcattacagtctcgccagaatgccgtcattgcctgaaagcggctttgtaatgagcggaatcagacggaaaaggtaaatcaaaaaagctctcttccttatcgaagagagctttttaattacttctttttttcatcgtagtattggacgggatacatggagccttcagataccattttgttgtcctcgatatcttgcgggtccgggtggccggctttatcgactgggaacgtttccatgtctggctgttttgttattttcatcttcatgctgtgaatgaattctcttgccttttggcgatttgacgggtcttttaatagataagaagtgatgccgacagttgaaacagcgagacctgaaagtaacagcttttgtttcatggtgatactcctttctattttaagaatagtgtttcctgtatcattcccgttttggttatagctaaacctcttgtgtttttatcattgaaatttacagtaaatactatttagaaagaaactagtgacttcattcctgtattggaaggtaatatacattgacttattattattttcagtcaaaattcgataaatattgacaaagtaaagtaatcagaataataatataattagcaagaaaatgtcatcctacatgaaaggtgttaacgatatgaatcaattgcatcgaagaatgggaacgttttccctcatgatggtcgggctcgggtcgatgattggctcaggctggctgttcggggcgtggcgtgcggcccaaatagcaggaccagctgctattatttcgtgggttattggaatggtcgtcattttatttattgctctttcttatagtgaattaggatctatgttccctgaagctgggggaatggtaaaatatacgcaatattcacacggttcgtttatcggttttattgcaggctgggccaactggattgcgattgtgtccgtcattccggttgaagcggtggcctccgttcaatatatgagttcttggccttgggaatgggcgaaatggacaagcggtttggtgaagaatggaacgctgactggggaaggactagcatttgcctctgtattgcttctcatttatttcctgctgaactactggacagttaatctattttccaaagcgaattcattaattacgatttttaaaattattattccgggtcttacgattggagctttgctgtttgtcggattccatggagaaaactttactagcggtcaaagcattgcgccgaatggctgggcaagtgtgctgacggcggttgccacttccggtatcgtttttgcgtttaacggtttccaaagcccgattaatatggcgggtgaagcaaaaaatccggggaaatcaattccgattgcggttgtcggctctcttttcgttgcgacagtgatttatgtcctgctgcagatcgccttcatcggagcggtgaatccttctgatattgctcacggctggagccatctgaattttaattctccttttgctgatctggcgattgcgctgaatattaactggcttgttattgtgttatatgcagatgcatttgtatcaccgtctggaactgggattacgtatacggcgacaacgtcccgaatgatttacggaatggaaaaaaacaaatacatgccgagtatattcgggaagcttcatccgatttacggcgttccgcgacaagcaatgttctttaacttgattgtttcgttcatctttttgttcctgttcagaggatggggcgtattagcggaaattatttctgttgctacgttaatttcttatatcaccggcccgatcacagtgatgacattgagacggacggggaaagacctgtacaggcctcttcgtttaaaaggcttaaatgtgattgctccgcttggatttatctttgcgtcactggtgctgtattgggcgcgctggccgttaacaggacaggttctgtttattatcctgatcggtcttccgatttatttctattatcaggcgaaggcgaaatggaaagggtttggccggaactttaaagccggcgtctggatggtgttttatctgctggccatgatggttatttcttatttgggcagtgataaattcggcggcctgaatgtcattcattatggctgggatatggttctgattgcgatggtatcccttgtattctatgtgtgggcgctgaagagcggctaccagacagaatacttaaaggatgcgaaagagataaattctcagctgcttaatggacagtcagaagctgctgccggaaaagaataaaatatagaagaaaaccttgcgatagttgtcgcaaggttttttgcttttaataacccttttttactttgtggaaaagatcaggatagttggtgaacactcctgttacgccccaatcaagcaggcgatgcatatcagcttcattattgactgtgtaaggatgaagcaggaggccgtggctgcggatcatacggacgttttcttgatttaaagctttataatccgggcccgcaccgacagcgtatgttttgatttcttccagggcagcatctgtcattgacgccatttgtttggcttccagcaattgaacggtcggcaggtttggctgtaattgatggacttttaccaggctttctttgctgaacgattgaatgatcacctggcctggcttagaatgctttcccagtaatttatgtttctgcaaagaagcgatcagtttttcttccatacctgggtaggtgtcaggcgattttgtttcaatgtagtagttcgcgtgctttccgaaacggtctaatacctcttctaatgtaggaactttaaggccgacgtactgcggctttgctttttccggataggcttcattaaaccaagaaccggcgtcaagcttcttaatgtctgcgagcgtatggtctttcacccaacccattccgtttgtggtgcggtccagtttttcgtcatgcatgacaatcaattttccgtcttttgtcatttgcagatccaattcaataaaatcagctttcattttctgagcggtttcgtaagacagaatcgtgtgctcaggcacatatccagaagcccctctgtgcgcgacggtcaggatacggtcaggtgacagcaggtttccttttgacgctgccgacactggcgttaccataaatgagagtaagcccagcgacagaacaaacaaggccagtattctattttttctcatgatttctcctccttatagataagcactacctgtctttcataataaaaaacggatgtaaacggcgtgttggaaaactattaatcttttatgtgtctttcttaaacatgctctgcccgttttcctgtattccacgtcaaagccaagaagacgatggcaagaatgcaggatgagatcagcatgataaagccgccgttccagttaaaacggtccacgacaaagcccataatggcgtttgcgaaggcggatccgccgatgtatccgaaaaatccggtcaaaccggctgcagttccggctgcttttttcggtgctaggtcaattgcttgaaggccgatcagcataacaggtccgtagattaagaagccaatgctgatcagggcgatattgtccacgagcggattgccggccggattcagccagtacaccaatacggcaatgaaaacacccgccataaacaaaacgcctgccggtgcccggcggcttttgaagaatcggtcactgatccagccgcacaagatcgttcccggtatgcctgcgtattcgtaaagaaaatacgaccagcgtgagtcttcaggagaaaagcctttggcttctgttaagtaagtaggcgcccagtcaaccacgccgtatcgcacgaaataaacaaatacattggcaaaagcgatgtaccaaagaaatttgttgttcagcacatattgaaaaagaatttcttttgttgttaattctttttcctgatttttaaaagcgtgttttggatagtcattccgatactcttcaattggcgggagtccgcaggattgaggcgtatcacgaaccaataaaacaattaaaaatgaaatgataatggcgatgatggcagggaagaaaaacacgcttttccaagtgacgaacatcgcgatcccaagagtgacaagcggagcaagaataccgccgcctatgttatgggcgacattccagatcgacatttttgtgccgcgttcacttatggagaaccaatgggccatcgtcctgccgcatggcggccagcccattccttgaaaccatccgttgataaacataaaaataaacatgatggtgacgctcgaagtcacccaaggcattgaaacgaatagaatattaacgattgctgataaaaataggcctgtcgccagaaaatatctcggattacagcggtcagacaccattcccatgatgaatttgctgaagccgtacgcaatggacacagcggccagcaccaaacccagttctgttttcgaaaatccctgttcctgcagataaggaatggcaaaggcaaagtttttccgcagcaggtagtagcctgcgtagccaatgaaaataccaatgaatacttgcagtctgagccgtttgtatgccgcatccatctttgaatcatccagtctctcaatatgaggagccggtttaaatatattaagcattaataattatccccctttgctgtttgtgctggatgtgtggcgtgcctcctttcccgaaaaacaaaaagagccagaaaacaccccttgtcaaaaggggttggattcctggctctcctcatctccatccaagctattaacttatcatgatagcgctttcttaaattatcatagtccggagcgaatgtaaacgggtaattttcaaattgggccttagggaagtgaatattatccttttactaaatgcaattatatttttttactagtaacataaaaatctggagggaggctgtttaaagatggatgaattagatatcgcattctttattttaccgttaggaattatgctgctatcgattgtcgggacctgtatttgtaaaaacccgtatctgatgccaatgcttagtttggtgatttctcttgtgctcacctttaccatttttaatcaatcatttttgggatgggctgttgtctatagcttggtttctctggctttatcctatatcacattgattgtggtaaggaaaaggaaggaatcaggaaattaaaaagacctcactttctaacatatcgttgactaaagcaactatatgtgattataattgctttagtcaacgatattagaaagtgggaattgatttgaaaacaagagaatcatctgtcgggttaaaattcagaaagttcaatcgattttatacaaacgtccttggtttccttaatgagcacatttacgacagcccgttttccttaacagaaacacggattttatttgagatttataatacgcctaattgtacggcaaaagctcttcaggataagctggggcttgaccggggatatgtcagcaggattgtgaagcagtttgaaaaagaagatttgatttataaacagaggagcaaagatgacgcccgccaccattacatttttgtcacagaaacaggaaaaacgatttataaaaagctggaggagaaagccaacgaacaagtagaactgatgctgaaggtaatcaaccaaaaggagcagcacaagcttgccgaggcgatggcagagattgaagcgatcctttcacagtcgctttctgccagagcatcagagatatcgattagagattattttctttcggaggatcttcaactccttattgagaaacaaagacaattttacgcggaggctcacggttgggatgacacgtttttagcttatcttcaggagacatttgacgctgacatcgaaaaaatatggattgcggaaagcggcgggaaatttgccggctctgtcgggttggtcaagcacgatgaaaagacagtccagctcagatggtttctggttgatgcggattttcggggcagggggcttggcacgcaattgctggagcatctggttgcatactgccaagacatgaagtttgaccgcattttcctttggacggtgagcacgatggctgaggctcgtccgctctataaaaaatttggattcaggataagtgaagtaaaacaagaagcgccattatggggacagcagctgacagaagaacggtgggatttggagctgtcatgaaaagactgcattatgcgtggatcatcgtctccgtcacctttttgatcttattggcggttcagggggtgcggctgtcgtttggtgcgtttgtggagccgtgggaacggcagttttcaatcgatagaagcaccatctcgctgatttcgacggtgagttttattgtttatggcatatcacagcctgtgatcggtcggcttgtggacaaatggggtgcccgggctgttttggcatggagtgcgttactgacaggagtcagcattttcttaacataccttgtgacttcgccttggcagctgtttttgctttacgggctgggtgtctcgcttggagtgggcggagcatcgaatgtggcggcaagtgtattggtcgtcaattggttcagcaaaaagcggggactagcctttgggatcatggaagcaggctttggcgcggggcaaatgcttctcgttcccggctcactcatgttgatccattggtttagctggaagctgacggttgtggtgttgggactgctgttaatcgtgattgtctttccggctgcgctgctgatgctgcggaacaatccttcagaaaagaatacagagccgataggcggactggctgcatcagaaaaagaaacagcacccaaaacaacagctctttcagtggccgggatgtttcgtatgaggcaattctggttcttgatttttccgtttttgatctgtggatttacgaccgtggggctgatggatacccatttgattccgttttctcatgatcatggcttttcaacgacagtcacgagtgctgctgtcagtctgctggcaggctttaatattgctggcatcttgctgtccggaattgtagcggaccggtggagcagccggaaaatcctgtgctttttatatgcggtgcgggcgctgtcgatcgtgattcttatttacagccacgagccctacttgcttttagcctttgcgattctgtttggattagtggactttgcaacggtagcaccgactcaaatgctcgccacccagtactttcaaaactactcgatcggcctcatgattggctggctgtcactcgcccatcagatcggatcggcactaggtgcgtatgtgcccggcgtcatctatacggtaacgggtgagtatacactggctttttatttgtcgattggaatgctcgtgcttgcgagcgtaatgaatatgatgctgagggagccagctgcggttacgcgtgacagtgcggctgtggtagagaagtgatgagagcagaggataagcatctctgatttgggattattcagagatgctttttttgtatttttgttctaatacgaagtcgatcataccgactatgcgggcgttttcggaattttatttgaagcgttctgaacgtttataagcgtaaaacctcaaacatctattgggaagttgagactatttaacatattttcatagttgatttgtaacgcagcgtgagatgtctgtcgtctacccataaactgtaatttagacattaagcatccattttacatccattctccaacagcttcgatttcggtttcatctccgagatgtagaggcctaaaagcgtaagggcgcctcctagaagagcgatccatgtcatgttttcatgcaggatcaggacggaggcggcgattgtgataaccgggaccatgtatatatacgcactggatttgacggctccgagcacgccaactgaataattccaagtggcgaagcacagggcagaagcgccaatccctaagaaaagcatgttgagtatatttgaagcagatgaaaatcggcttaggtcaaaatggaagtcgaacaaaaataaagcgggaaccataaacaataagccgtacaaaaatactctctgtgtcaactcgatgatgtggtattcgtaagcgcttaattttttcatgaatatcgagtatccgccaaacacgagagcagccccggctgccatgatgtctccgagcggatttagacgcagtaccacattgccgttaaacgtaatcaataaaagcccgatcagtgccgagacaaatccaatcaaaaaagtcagacgcagtttttcgccttcgagcagaaaatgggccaaaaccgcagtgatcatcggtataatggacacgatcatgccgacattggatgcgtatgtataggtgagagctatattttctaatagaaagtataaggttacgccaaataaaccagctccggcaaacaacagctcctgccgccaatttctgaacggaatcatgttgggacggacgaggataagagcgataaagcccatcaaaaaccgataaaataatatttccattggagagaagtcagccagcagaacttttgtcgaaataaaggtcgtcccccaaatcagaatggtcacaatggctgcgatatgccccgaagtttctctttgtatgttcatctgtgaagctccttttcaaaaatcttcatgtattgcttcggcgtcagccccacctgccgtttaaaaaacttcgtcatatgactctgatcgctgaatcctgtctgaaatgccgcatcaatcggccttaccccttgttcaaggagttttttggcttgattaatccggattgtttccatgtagctattaggggtaatgcctttttgttttgtaaatgaacgcaataaatgatacttgctccagcctgttaattcactcaaatcattgagtgtaacattttcggcataatgctcttctaaaaattcacaaaccattttgacttcgtctgatggttctggaacgctgctaaggaacgtgacatctgaataatggcggatcagctcctctaatagatgaagaaacagctcctccttacgcaaagcttgtttttcctcggatatcaaaatatgcaattcctgcaggctggctgtcagctcatggcggaataacacatgctgggagaaataagggagatgcccggagccagtaatctctttcaccgccttctccatgatatccggcatgacattgatacaccgataatcaagcgtccggccgtcaatctgttcacagctatgcgtgtcacgggggttaaagaggagaagatcacctggattgatgatatattcttgatcctgacaggccagataccgttgccctttttcaataaatccaatcacataataatcgtgaaagtggttcgggaacttctgcataattcccttgaagcggtaggcttctatatgaaggtgtgggtcaagctgcagtgtgcgggtttcgttttgcatgggatgcctcctgtcggtgtggtggtcttggattaagtgtagcatgatttagggggatttcttgtatgatgttgctgtttaggaatagagaaagcagaccgttattggtctgctttcttttccatcagtcatgaataggatttgtggtgcccatctcaactaatgtaaacgtatacatattgtgctaataggcgggcatctggatttttccaactcaacagggctttaaaatctatgctgactttctatgtgaacgaattctgtcagcgggtagaagaaaacaggaggtcaaaaatatactctgatttcacctacgttcgttataacttagtattttaaaattaaacatctggtaaagaagtatatcgacacaaattttcaagaaggtttatatgatgaatgattcaaacttgttgtgaacgtattatgccacgtagggcattatattagttgttcaccacatttaccgctaacaccagccataggcaatccgattaaatcctttagaaaatcagcaggtcaattgggccctctgccctttttatataaaatcactgccgcgttgtagacataatgtcattaagcgcccgtggttctaatacctagccttacctgtgctgacagggataaattttgtcaccttatcaatagtccatgagatcacttgtgtcagcaattttaatcaattcgggcaattgacttctagaaaaagcatatattcatgattcaaccacatagaaagagaggaactggaaaagttccgatgtttgattactgtttttcctcttcaaaggtttgtcgaaagtccggataaccgagttttagttttcatagagagtgacgtaggctttgagacgcactatctataaaaagtcctaatggaatagattatgtatcaaacaagcctttaaggctatgtctataccctttaggtcttttatttacaaaaaaataaacttttggattatttttagagttttcagccagaataaggttacaaatattagagatgaaagaattttttacaattaaaataggtatatagggataaatctaaaaacaaatgaaaggatgaaagtaggtttcttttaacaaaaattccttgttttttatatcgaatgtttttgaggacaattaattaaaatatggaacacaagttcgattttttctaggaaaagaaaggtgattgcatatgtatacacttcaagaaattagtaaacctaaaagaaaaaaactagtgaaaaatattgagaagcacttaaagaactacaataattacaaagttgccatccttaatctaagtaaacagcttgaattcatagctacaaatgataatatggaaatctttaaagaaagcatcgatgatgactgtgagtttcaggcatcagtggataaacttgccagtgagttgcaacatatcaaacttctaaaagattcaatcgatatttcattatcagaattaacagaactagagtacagatttgttcaataccgttatttcaaaaattggaccatcgaaaaaagtgcactagagatcggttatagtgataaagcactgtttgtaatccgtaatcaggtaatggataaattattgatcagcttagggagcgttgtttacatgtaaaactttatagagctgtataaaagcagattggtacataaaatctttaaagttgaagatagaagtataactaaatcaaaatacttctacctttttctttaaagttatcaattattatacttttaaaaagatagctcttaactgatagcaatagattttaaaaataaaggagatttgatgatggataaagggacatttgttagaacgttcgtcttgatcataacacttataaaccaactactcacaatatataacaaatcacctcttcctttagacaatgaacaattggaacaattcgtatctatggtattcacctctgtagcagcaataatagcatggtataaaaacaattatgttacaaaaaaagggcactcacaaaaacaattattgaaggagaagaatttaattaaagtcaaaaaataataatcataagacctgtagctctcctaaataggggagctttttatttatatacctagaatgagatacataaaatataaaattactttgcactcaatgataggcgcatcatctttgactgagcttactaagggagtaagtctattatctatctagagataggaagtttataaaatgaatgagacagggaattaaaagtcaattatagccctaaaaagttggtcatactgcttttttaacctgtgcctaagaacctaaggttgaatactttttaggttcttttttttatttttatgggatttttagcttacttaatgagtactcttaaacctcattctagatttaagataattatgtactcttcctcatggggattaaaaaaaaaatggaggtttattatggcaacaacatattctacaactgtttaaacccagctcattgagctgggttttttgtattttggtttattggtatcataaaattccacttaactgtataatataataactttataccgaattttaaatcagcaatcaggttttgtggaccgagaaaatggaaataataaaggatagagcgagaaagttgaaaattctcgagaaacggcttatagtaagattatagtcaaatatagtcaaagtcagtaaaggagggggttgagtgggacataatatttctgacatcattgaacaatatttaaaacgagtgttagatcaaaatggcaaggaaattttagagattaaacgaagtgaaattgcagataaatttcaatgcgttccttcccaaataaattatgtcatcaacaccagatttacaagcgaaagaggatatattgttgagagcaaacgcgggggcggcggttacatcagaatcattaaaattaaaatgaacaatgaagttgtcctgatcaataatataatttctcaaattaatacccatttgtctcaagcagcctctgatgacattattttaaggctattagaagacaaggtaatttcagaaagagaagcaaaaatgatggtcagcgtaatggaccgctcagttttacacattgacttacctgaacgtgatgaattaagagcgagaatgatgaaggcaatgttgacttctttaaaattaaaataagcgggtgaaaagattgatttgtcaagagtgccacgagagaccagccacttttcactttacaaaggttgttaacggagaaaaaatagaagttcatatttgtgaacaatgtgccaaagaaaatagtgattcatatggtataagtgcaaatcagggtttctctattcataatttactttcgggtttactgaacatggattcttcatttcaaaatgcaggaactcaaatgttcagtcactcggagcaaatatctgcttgtccgaaatgcggaatgacttttcagcaattcagaaaaattggtcgttttggatgttctgaatgttacaaaacatttcatagcaacattacaccaatcctacgtaaagtgcacagcggaaacactgtgcatgcaggtaagataccgaaacgaataggcggcaatcttcatgtcagacggcagattgatatgctaaaaaaggaattagaatccttaatccatcaagaagaatttgaaaatgcagctcatgtaagagatcaaattcgttcattagaacaatcactcaaaagtacagatagtgaggaggaacaggagtaatgtcgctaaagcattttattcaggacgcactaagcagttggatgaagcagaaaggacctgaaagtgacattgtactcagcagccgcatacgtttagcaaggaactttgagcatattcggttccctacgcggtattccaatgaagaagcctcatccatcatacagcaatttgaagatcagttttcagagcaagaaattcccggaatcggcaaatttgttttgattagaatgaatgatgcacagcctttagagaagcgtgtacttgttgaaaaacatctaatcagtccgaatctgacagagtctccttttggcggctgtttgctttctgaaaatgaggaagtaagcgtcatgctaaatgaagaggaccatattagaattcagtgtcttttccctggatttcagcttttagaagcaatgaaagccgcaaaccaggtcgacgactggattgaagaaaaagttgattatgcattcaatgagcaaagaggatacttaaccagctgtcctacaaacgtaggtacaggtttaagggcttcggtcatgatgcatctgccggcgctggttttaactaggcaaataaatcgaattataccggcaattaatcaattaggcttagttgttagaggaatttatggggaaggcagcgaagcagtagggaatatctttcaaatttcaaatcagatcacgcttggtaagtcagagcaggatattgtagaggatcttaacagtgttgctgctcagttgattgaacaagaacgatccgcccgagaagcgatttatcaaacttctaaaatcgaacttgaggatcgggtatatcggtcttatggggtcttgtctaattgccggatgatagaatcgaaagaaactgcaaagtgcctttcagatgttcggttaggcatagacttaggcattataaaaggactttcaagcaacatacttaacgaacttatgattttgacgcagccaggttttttacagcaatactcgggaggcgctttgcgtccgaacgaaagggacattcgaagagcggctctcatcagagaacggcttcacttagaaatgaatgggaaaagacaggaggatgaatcgatatgatgtttggaagatttacagaacgagctcaaaaagtactggcgctagcacaggaagaagcacttcggttaggtcataataacattggcactgagcatattttattaggactggtaagagaaggagagggcattgctgctaaagctcttcaagcgcttggactcggttcagataaaattcagaaagaagtagaaagtttgatcgggcgcgggcaggaaatgtctcaaacgattcattatactcctagagctaaaaaagtcattgagctttcaatggatgaggcaagaaaactcggtcattcttatgttggaacagaacatattcttcttggactgattcgtgaaggagaaggtgttgctgcgagagttttgaataatctcggtgtcagcttaaataaagcaagacagcaggtgctccagcttctaggaagtaatgaaacaggatcatcagcggcaggaacaaacagcaatgcgaatacgcctacgcttgacagcttggcaagagacttaactgctattgcgaaggaagacagccttgaccctgtaatcggcagaagcaaggagatccagcgtgtcattgaagtgttaagccgcagaacgaaaaacaaccctgttctcattggggaaccaggtgtaggtaaaacggctatcgcagaaggtttggcacagcaaattatcaataatgaagtacccgaaattttgcgtgataaacgtgtgatgacattagacatgggaacagttgttgccggcacaaaataccgcggagaatttgaggatcgcctgaagaaggtcatggatgaaattcgccaggcaggaaatatcattctattcatcgatgagctccatacattaatcggggcaggcggagcagaaggtgctattgatgcatctaatattttaaaaccttcacttgctcgcggcgaactccaatgtattggtgcaacgactcttgatgagtaccgtaaatatattgaaaaagatgcagcactggaacgccgttttcagccgattcaggttgatcagccatctgtagatgaaagtattcaaattttacaaggtctgcgtgacagatacgaagcccaccaccgcgtttctatcactgatgatgccattgaagctgcggttaagctttctgacagatatatttctgaccgcttccttccggataaagcaattgacttgatcgatgaagcaggttcaaaggtgagactgcgctcatttacaacgcctcctaacttaaaagagcttgagcagaagcttgatgaggttcgtaaagagaaggatgcggcagtgcaaagccaagagtttgaaaaagctgcttccttgcgtgatactgaacaacgcctgcgcgagcaagtagaggatacgaagaaatcatggaaagagaagcaagggcaggaaaactcagaggttactgtggatgatattgcgatggttgtatccagctggaccggtgtgcctgtatctaaaatcgcccaaactgaaactgataagcttctcaatatggaaaacattcttcattcccgcgtcatcggccaggatgaagcagttgtagctgttgcaaaagccgtcagacgtgcgagagcaggattgaaagatcctaaacgcccaatcggctcattcattttcttaggccctacaggtgtaggtaaaacagagcttgcacgagcactcgctgaatccatttttggcgatgaagaatccatgatcagaattgatatgtctgaatacatggaaaaacactcaacctcaagacttgttggttcacctccgggatatgtgggatatgatgaaggcggtcaattgacagagaaagtcagaagaaaaccttactctgtcgtgcttcttgatgagatcgagaaagcgcaccctgatgtcttcaatatccttctgcaagttcttgaagacggacgattgactgattctaaaggacgcacagtcgatttccgcaataccattctgatcatgacatcaaacgtcggagcaagtgagctgaaacgcaataaatatgtcggctttaacgttcaggatgaaactcaaaatcataaagacatgaaagacaaagtgatgggtgaattaaaacgagcgttcagacctgagttcatcaaccgtatcgatgaaatcattgtcttccattcacttgagaaaaaacatcttactgaaattgtgtcattaatgtctgatcaattaacgaaacgcttgaaagaacaagatctttctatcgaattgacagatgctgcaaaagcgaaagtcgcggaagagggcgttgacctggaatacggtgcccgtccgttaagaagagcgatccaaaaacatgtcgaggatcgtttatctgaagaactcctcagaggaaatattcataaaggacagcatattgttcttgatgtagaagatggcgaatttgtcgtaaaaacgactgctaaaacgaattaatatagaagacggaaatgaggcatacagcatgtaagtgtatgcctcactttcatatcaagaaatagaacaagggagaggtcttacactatatatggctaaaacaaaatcgaaattcatctgccaatcctgcggctacgagtctccaaaatggatggggaaatgtccgggctgcggtgcttggaatacaatggtggaagaaatgattaaaaaagcaccggccaatcggagagcggctttttctcattctgttcaaactgtacagaaaccttcacctattacatcaatcgaaacatcagaagaaccccgcgtcaaaacccagcttggcgagtttaacagagtactcggcggaggtgtcgttaaaggctccctcgttttaattggcggtgatcctggtatcggaaagtcaacgctattactgcaggtttccgctcaattatcaggctcatcaaacagtgtcctgtatatttcgggagaagaatctgtaaagcaaacgaagctgcgagcagaccgtctgggcattaataatccgtcactgcatgttttatctgaaaccgatatggagtatatttcgtctgctatacaagagatgaatccagcgtttgtcgttgttgactctattcaaacggtttaccaaagcgatattacatcggctccaggcagtgtgtcacaggtcagagaatgtactgctgagctgatgaaaatcgcaaaaacaaaaggtattccgatttttatcgtagggcacgtgacgaaagaagggtctattgcaggtccgagactgttggagcatatggttgacactgttttatattttgaaggagaacgccaccatactttccgtattttgcgggctgtaaaaaaccgtttcggatctacaaacgaaatgggcattttcgaaatgcgggaagaggggctcactgaggttttgaatccttcggaaattttcttagaagaacgctctgctggttccgcaggctcgagtatcactgcctctatggagggcactagaccgattctcgttgaaattcaggcgctcatctcgccaacaagctttggcaacccaaggcgtatggcaacgggaatagaccataacagggtttctctgttaatggctgtgttagaaaaaagagttggactgctgctgcaaaatcaggatgcttatttgaaagtggctggcggcgttaagcttgatgaaccggcaattgatcttgcgattgtgattagtatcgcatcaagctttagagacacacctccaaatcctgcagattgttttattggagaagtgggattaaccggagaagtccggcgggtttcaagaattgaacagcgtgtgaaagaagcggcaaagcttggctttaaacgcatgatcatacccgcggcaaatctggacggatggacaaaaccaaaagggattgaggttatcggagtagcaaatgttgcagaagcgcttcgtacttcattaggaggataatagatggaaaaagagaaaaaaggggcgaaacacgagttagacctgtcatctatattgcagtttgttgctccgggtacaccgctcagagcggggatggaaaacgtcttgagagcaaatacaggcggtctgattgttgttggatataatgataaagtaaaagaagtggtggacggcggctttcacataaacacggctttttctccggcgcatttatatgagttggctaaaatggatggagcgatcattttaagtgattcgggtcaaaagatcctctacgcgaatactcagctgatgccggatgccacaatttcttcatcagaaacaggaatgcggcacagaactgccgaaagagtagctaagcaaactggctgtcttgtaatcgctatttctgaaagaagaaatgtcataacgttatatcaggaaaacatgaagtatacactaaaagacataggatttattttaaccaaggcgaaccaagccattcaaacacttgaaaagtataagacaatcctcgataaaacgattaatgcactgaacgcgttagagtttgaggaacttgttaccttcagtgatgtcttgtctgtcatgcatcgttatgaaatggtactgagaatcaaaaacgaaattaatatgtatatcaaagagctggggacagaagggcatctgatcaaactgcaagtcattgaattgattacggatatggaagaagaggccgctttatttattaaggactatgtaaaagaaaagattaaagatccgtttgtcctcttgaaggagctgcaggatatgtccagttatgatctgctggatgattccattgtgtataagcttctcggttaccctgcttctactaatcttgatgattatgtattgccgagaggatacaggctgttaaataagataccgcgtcttccgatgccgattgttgaaaatgttgtagaagcatttggagtcctgccaaggattattgaggcgagtgcagaagaattagatgaagtagagggaatcggtgaagtacgagcccaaaaaatcaaaaaaggattaaaacgcctgcaagagaagcattatttagacagacaactgtgatttcggttaaaaccttatgaatacgggtatattaatgttggtttttgtttattctgatattcgtaggatgcataagactttgtgaaattaaaatgttaaaaaaggaggtgggggtatgttaaaacgaatagttcaggcgttcttcattatttttggcggcgttgttggtatatttttgatacctgaattgtttgtactgttaaatatacaggacatacctttaataacaaacgcatatacgtctgcggcaataggagcaattatcttttttctcatcagtatatggggtacagaatacgttgtgaactgggtgaagtggatagaggattcattgttaaaagcgccggttccagatttgttatttggaagtcttggcttagtttttggacttataattgcttatcttatcgtaaatgttattcctttagacaatataccttaccgcatattcagcacaataattcctgtatttttggctttcttcctcggttatctcggcttccaggtgggctttaagaaaaaggatgaattgatcagcctgttttccatttccgccagaatgcaaaagaaaaaaggaacagctgatgaagaacatgaggttcaagacaagaagctgaaaattttggacactagtgttattattgatgggagaatagcagatatttgtcagactggttttttagagggagttatcgtgattccgcagtttgtccttgaggaattgcagcatattgcagactcttcagatgttttaaaacgaaacagaggacgccgcggtcttgatatcctgaaccgcattcagaaagaattagacattgaagttgaaatttacgaaggcgactttgaagatattcaggaggttgacagcaagctcgtcaaacttgctaagctgacatccggggtcgttgtgacgaatgattttaatttaaataaagtgtgcgagcttcagaaggtagcagtattaaacattaatgaccttgccaatgcggtcaagcctgttgtgcttcctggcgaggaaatgaatgttcaggtcattaaggacgggaaagagcataatcagggagttgcctacttggatgacggtacgatgattgtcgttgaagaaggacgcaattatatcggcaagcatattgatgtactcgtcacaagtgtgctgcagacagcagcgggacgaatgatttttgcgaagcctaagctgttggagaaggcgctgtaaagggagaaaaaacaatgagttatgatgtggtgattcctgcagccggacagggaaagcggatgaaggcagggagaaataaactgttcattgagctgaaaggagacccggtgatcatacacacgttaagagtgtttgacagccaccggcagtgcgataaaatcattttggtgattaacgagcaggagcgggagcactttcagcaattgctgtgcgattacccgtttcaaacttcaattgagcttgttgcaggcggagaagagcgtcagcacagtgtgtataaggggctgaaagccgtaaagcaggaaaagattgtccttgtacatgacggtgcccgcccatttataaaacatgaacaaattgacgaactgatcgcagaggcggaacagacaggagcggccatccttgctgttccggtaaaagatacgattaaacgcgttcaagatttacaagtcagtgagacgattgaacgttcaagcttgtgggctgtccaaacgccacaagcttttcgtctttctttattgatgaaggctcacgctgaggccgagcgcaagggatttttagggacggatgacgccagcctcgttgaacagatggagggcggttcggtccgtgttgtagaaggcagctatacaaatattaagctgacgacgccagacgatttgacgtcagctgaagctatcatggaatcagaaagtgggaataaacatgtttagaattggacaaggatttgatgtgcatcaattagtggagggccgtcctctcattattggcggaattgaaatcccgtacgaaaaagggctgcttggccattctgatgcagacgtattgctgcatactgtcgctgacgcctgcctgggagctgtgggtgaaggagacatcggcaagcattttcctgacacagatcccgagttcaaggacgcagattctttcaaattacttcagcatgtctggggaatcgtgaaacagaaggggtatgtccttgggaacattgattgcaccatcatagcgcaaaagccgaagatgctgccgtacatagaagatatgagaaaaagaattgctgaaggccttgaggcagatgtttctcaagtaaatgtaaaagcaacaacgacagaaaagcttggatttacaggccgggcggaaggaatagcggctcaggcgacagtgctgatacaaaaaggctaacttgttttgatgccgggtctatttggtggtagaatagattcatacatttttgcctgaggccatacatgacatgaaaggaagtatttgaaaatgggaaacgaagtacgcgtccgttatgcaccgagtccaaccggacatttgcatattggaaatgccagaacggcgctttttaattatttatttgcccgcaatcaaggcggtaagtttatcattcgagttgaggatacagataaaaagcgcaatattgagggcggagaacaaagccagctgaattatctgaagtggctaggtattgactgggatgagagtgtggatgtcggaggagagtacggcccataccgtcagtcagagcgtaacgatatctataaagtgtactatgaagagcttcttgaaaaagggcttgcttataaatgttactgtacggaagaagagcttgaaaaagagcgtgaagaacagattgcccgcggagaaatgcctcgttattctggaaaacacagagacctgactcaggaagaacaggagaaatttatcgctgaaggcagaaaaccaagtattcgtttccgcgtgccggaaggaaaaatcatcgccttcaatgatatcgtaaaaggcgaaatttcttttgaatcagatggcatcggcgactttgttattgtgaaaaaggacggaacgccgacttacaacttcgcggtagcgattgatgactacttaatgaaaatgacacacgtgctgcgcggtgaggatcatatttctaacacaccgaaacagattatgatttatcaagcattcggatgggatattcctcagttcggacacatgacgctgattgtaaacgaaagccgtaaaaagctcagtaaacgtgatgaatccattattcaattcatcgagcagtacaaagagcttggctacctgccagaagcgctgttcaactttatcggactgctaggctggtcaccggttggagaagaagagcttttcacaaaagagcagtttattgaaatttttgatgtaaatcgtttatctaaatcaccagctttgtttgatatgcataagctaaaatgggttaacaaccaatatgtgaagaagctggatcttgatcaggttgttgaactgacgcttccgcatttgcaaaaagcgggcaaagttggcactgagctttctgctgaagaacaagagtgggttcgtaaactgatttccctgtatcatgagcaattaagctacggtgcggaaattgttgagctgactgatttgttctttacggatgagatcgagtataatcaagaagcgaaagctgttctggaagaagaacaggttcctgaagtgctcagcacattcgcagcgaagcttgaagagcttgaggagttcactccggataacatcaaagcatcaatcaaagcagtgcagaaagaaactggccataaagggaaaaaactgtttatgccgattcgtgttgctgtaacagggcaaactcacggtccggaactgccgcaatcaattgaattgatcggtaaagagactgcaattcagcgtttaaaaaatatctaaataaatgattgttgacagggaagagtataaagctttaggccattacagaaaggatctccattggctgagagagatccatgagccgggttttagaagtgcgcccttaagacctttgaagaacgttttttgaaaccagtattcaaaggcggccgccgccgttacaggctgaagttgggagagcagaagtctgcttttcaaacagagtggaaccgcgcggttaaagcgtctctgtcatgtttacatgcagagacgctttttttattgggtagaggaaatcagatagagaaacggggggaagcatgtgttttttagaatgctcaaagaagacattgatactgtgttcgatcaagatcccgcagcaagaagctattttgaagtgattttaacttattccggtttacatgctatatgggcgcatcggattgcacatgctttatataaacgaaaattttatttccttgcacgccttatatctcaagtaagccgattttttaccgggatagaaatccacccaggcgctacaatcgggagaagatttttcatagaccacggcatgggggttgtcattggggagacatgtgaaatcggcaataacgtaaccgtttttcagggggttaccctcgggggaacggggaaagaaaagggaaaaaggcacccaacgattaaagatgacgcattgatagccacaggtgctaaagtgctcggttctattacggtcggtgaaggctcaaagattggcgctggttcagtagtgctgcatgatgttcctgatttttcaacagttgtcggtatccctggacgggtcgttgtacaaaatggcaagaaagtaagacgcgatttaaaccatcaggatttgcccgatccagttgctgaccgctttaagtctttggaacagcagattttagagctgaaggcagaacttgaagacagaaaagaaaggatcaatcaaaaatgacaatcacactttataatacattgactagacagaaggaaacattcgttcctcttgaagagggaaaagtgaaaatgtatgtatgcggacccacggtttacaattacattcatatcgggaacgcgcgtccggcaatcgtttacgatacggttcgaaactatttagagtataaaggctatgatgtgcagtatgtctctaactttacagacgtagacgataaattaattaaagcggcaaatgaactcggtgaggatgtacccaccatttcagagcgttttattaaagcatactttgaagacgtgggtgcgctcggctgccgaaaagccgaccttcatccgcgagtaatggagaacatggatgccattatcgaattcgtagatcagctcgtgaaaaagggctacgcatatgaatcagaaggtgacgtatatttcaaaaccagagcgtttgaagggtacggaaagctttctcagcaatcaatcgatgaacttagatcaggtgcacgcatccgagtcggcgagaaaaaagaagatgctcttgatttcgcactgtggaaagcggcaaaagaaggagaaatctcttgggatagcccttgggggaaaggacgtccgggctggcacattgaatgctcagcaatggtgaaaaagtatctcggtgaccagattgatatccatgcgggcggacaggatttaacattccctcaccatgaaaacgaaattgcgcaatctgaggcgctgacaggcaaaacgtttgcgaagtactggcttcataatggttatatcaatattgataatgaaaaaatgtcaaaatcactaggcaactttgtgcttgtccatgacatcattaaacagcatgatccgcagcttttgagattctttatgctatctgttcattatcgccatccgattaactattcagaagagcttctggagaatacgaaaagcgcgttcaaccgcttaaaaacagcgtacagcaatcttcagcaccgtcttaacagcagtacgaatttaaccgaagatgacgatcaatggcttgaaaaagttgaagaacaccgcaaagcattcgaagaagcgatggacgatgattttaatacggcgaatgccatttcagtcttgtttgacttagcgaaacacgccaattattatcttcagaaagatcatacggctgatcatgtgattacggcgtttattgagatgtttgaccgcattgtttctgtccttggtttttcgttgggtgagcaggaacttctcgatcaagagattgaagacttaatcgaaaagcgaaatgaagcgcgccggaatcgcgattttgcattgtcagaccagatccgcgaccagctgaaaagcatgaatatcattcttgaagatacggctcaaggcactcgctggaaacggggagaataacagatgcttgaatttgatacgataaaagattctaagcagcttaacggtcttgcgcttgcttatataggtgatgccatttttgaagtgtatgtcaggcatcacctgcttaagcagggctttaccaaaccaaatgatcttcataagaaatcaagccggattgtttcagcaaagtcacaggctgagatcctattttttctgcagaatcaatcattttttacggaagaagaggaagcggtgctgaaaagaggcagaaatgccaagtcagggacaacacctaaaaatacagatgttcagacgtaccgctacagtacagcatttgaagcgcttctgggctacctttttctagagaaaaaagaggaacgacttagtcagctcgtagccgaagctatacaattcgggacgtcagggaggaaaacaaatgagtcagcaacatgattacgtcatagggaaaaatgcagtgatcgagacgttaaaatctgatcggaagctgtataagctgtggatggcggaaaacaccgtaaagggacaagcacagcaagtgattgagcttgccaaaaagcagggaatcacgattcaatacgtcccgagaaaaaaactcgatcaaatggtgacaggacagcatcagggcgtagtggcacaggttgcagcgtatgaatatgcagaactggacgatttatataaagcagccgaagaaaaaaatgaacagcctttcttcctcattctggacgagcttgaagaccctcataaccttggttccattatgaggacagcagatgcggtcggcgctcatggcatcgtcattccaaaacggagagctgtcgggctgacaacaacagtggcaaaagcttcaacaggagcaattgagcacattcctgtagcaagagtcaccaatttggcacggacgttagaagagatgaaagagcggggaatctgggttgtcggaacggatgcgtccgcgcgtgaggattaccgtaatatggacggcaatatgcctttggctctagtcatcggaagtgaaggaaaagggatgggccgccttgtgaaggaaaagtgcgattttctcattaaactcccgatggccggaaaggtaacttcactaaatgcatctgtcgcggctggtcttttgatgtatgaagtctaccggaaacgaaaccctgtgggagaataaagacccatggatatcctgttagtagacgggtacaacatgattggagcctggccgcagctgaaggatttaaaagcgaacagttttgaagaggcgagagacgtactgattcagaaaatggcggaatatcaatcgtatacaggaaacagggttattgttgtttttgacgcgcatctcgtaaaagggcttgagaaaaaacagaccaaccatagagttgaagtaatttttacaaaagaaaatgagacggctgatgagcggatagaaaagctcgctcaggctttgaataatattgcgactcaaattcacgttgcgacctctgactatactgagcagtgggcgattttcggacagggggcattgcggaaatcggcccgagagcttttgagagaggtagaaacgattgaaaggcgaatagagagacgggtaagaaaaatcacttccgaaaagccggcgggtaaaattgctttatcggaagaggttttgaaaacgtttgaaaagtggaggcggggagacttagattaagttgacgcttttttgcccaatactgtataatatttctatctacgtgcgccggggggatcggagtgaatctacagaacaacaagggaaaattcaacaaagagcagttttgccagttggaggacgagcaggtcattgaaaaggttcatgttggggacagtgatgcgttagattacttgattacgaagtaccgaaactttgttcgggcaaaagcaagatcctatttcttaataggggcggacagagaggatattgttcaggaaggcatgataggcctctataagtctattcgtgacttcaaagaggacaagcttacctcattcaaagctttcgcagaattatgtattacccgccaaattattaccgcaataaagacagctactcgccagaaacacattcctttgaattcctacgtctcattagataaaccgatttttgatgaagaatcagaccgaacgctgctggatgtcatttcaggagcgaaaaccttaaatcctgaggaaatgatcattaatcaggaagaatttgatgatattgaaatgaaaatgggagaactattaagtgatttagagagaaaagtactcgtcttatatctcgacgggagaagttaccaagagatttctgatgaactgaaccgacatgtgaaatcgatcgacaatgcccttcagcgtgtgaaacgcaagctggagaagtacttggaaattcgcgaaatcagtttgtaataggaatttatgctatattgacagtatttttctgactatgatatgttactaaagataagaactaatgtctatttagaaaaaggtgtaatgacatgagaaaaaagattacgttagcatgcaagacatgcggaaaccgtaattatacgacaatgaagagctctgcatcagcggctgagcgattagaagtaaagaaatactgcagtacttgcaattcacatacagctcatcttgaaacaaaatagtttttgcgcttttaaattgtggaggtcttttacatgcgtattatgaaattctttaaagatgttgggaaagaaatgaaaaaggtaagctggcctaaaggaaaagagttaacgcgttataccattacggtaatttcaacagttatcttttttgttatcttttttgccctccttgacacaggaatttctcaattaattcgtttaatagttgaataatgatcagcaatacgtgctataatagatcataatattacttgccaaaacccgttcagcgggttttttattgtggcttaaaatgatagttatcataggcttgccgcctattttttgaagcgttatggtaattcactaaaaccaaatgcggggagggaaggactggacagtcctgaatagaatggaaaagaattggtatgttgttcacacgtactctggttatgagaataaagtaaaagccaacttggaaaaacgtgttgaatcaatggggatgcaggataaaattttccgtgtagtcgtacccgaagaagaagaaacggatatcaaaaacggcaagaaaaaagtcgtgaaaaagaaagtgttccctggttatgtgcttgttgaaattgtaatgacagacgactcttggtatgttgtccgaaacacgccgggcgttactggattcgtaggatctgccgggtcaggttcaaaaccgacgccgcttcttccgggcgaagcagaaaccattctgaagagaatgggcatggatgaacgcaaaactgatattgactttgaactgaaagagacagtgaaagtaatagacggaccttttgctaactttacaggatcaattgaagagattgattatgataaaagcaaggtcaaagttttcgttaatatgttcggccgtgaaacgccggttgagctggaatttacccaaatcgataaattgtaatgtgaaaaaacttgaaattgctatatataaatgataatatagcaaaggtacgtcttggacttatccaaggcaactagcatgatatttcgtcattcatataaagaatgaaaccttgagtgggagggtttaccctattaccacatcacggacttaaggaggtgtgtctcgtggctaaaaaagtagttaaagttgtaaaattgcaaattcctgctggaaaagctaacccagcaccaccagttggacctgcacttggtcaagccggtgttaacatcatgggattctgtaaggagtttaacgctcgtacagctgaccaagctggtttaatcattcctgttgaaatttcggtttacgaagaccgttcatttacatttattacaaaaactccacctgctgcagtattgcttaaaaaagcagctggaattgagtctggttctggtgaaccaaaccgtaataaagtggcaaccgttaagcgcgataaagtacgcgaaatcgctgaaacgaaaatgcctgacttaaacgcagcagacgttgaagcggcaatgcgcatggttgaaggtactgcccgcagtatgggtattgtaatcgaggattaatttgtttcttgtcgggttgcgagttttaacaagttcgcaacccttattcgtgggaggttattccgctataaccacataaggaggaaattttaaaatggctaaaaaaggtaaaaagtacgttgaagctgctaagcttgtagaccgttctaaagcttacgacgtctctgaagcagtagctctcgttaaaaaaacaaacacagctaaattcgacgctacagttgaagtggctttccgtttaggggttgaccctcgtaaaaacgaccagcaaatccgtggagcagttgtgcttccaaacggaactggtaaaactcagcgcgttctcgttttcgcaaaaggcgaaaaagcgaaagaagctgaagctgctggtgcagatttcgtaggcgacactgactacatcaacaaaattcaacaaggctggttcgatttcgatgttatcgtagctacacctgacatgatgggtgaagttggtaaaatcggtcgtgtacttggaccaaaaggtttaatgccaaaccctaaaactggtacagttactttcgaagttgaaaaagcgatcggcgaaatcaaagctggtaaagttgaataccgcgttgataaagctggaaacattcatgttcctatcggtaaagtttctttcgaggatgaaaaacttgttgagaacttcacaacaatgtacgatacaatccttaaagctaaacctgctgcagctaaaggcgtttacgtgaaaaacgttgctgtaacttctactatgggacctggtgtcaaagtagactcttcaacttttaacgtaaaataatattgacacgacatcaacattctgatattattcaaaatgttgtaaaatagaatatcatttataccgtagacagtaggggcctaaccgcttaattatcctaccgaggtgtatattatcacagctattacgttacgtatgcttgtatatacagcctccatgtctcatggaggctttttatatggaatccgtcgtctcagtcgtgatcacctaacggtataagtgttacacaagaatctacaggaggtgtaaccatgagcagcgcaattgaaacaaaaaaagttgttgttgaagaaattgcttctaaactgaaagaaagtaaatcaacgatcatcgttgactatcgcggacttaacgtttctgaagtaactgaacttcgtaaacagcttcgcgaagctaacgttgagttcaaagtttacaaaaatacgatgactcgccgtgcggttgaacaagctgagcttaatggtttgaatgatttcttaactggaccgaacgcgatcgcattcagcactgaagatgttgtcgctccggctaaagttcttaatgacttcgctaaaaatcacgaagctcttgaaatcaaagctggcgttatcgaaggtaaagtttctactgttgaagaagtgaaagctcttgctgaacttccatcacgcgaaggcttgctttctatgttgcttagcgtacttcaagctccagttcgcaaccttgctcttgctgcaaaagctgtggcagaacaaaaggaagaacaaggcgcttaatctaatcagtttttcataaattaaaacaaaatggaggaattacaaatggctttaaatatcgaagaaatcattgcttccgttaaagaagcaactgtacttgaattgaacgacctagtaaaagcaatcgaagaagaatttggcgtaactgctgctgctcctgtagctgtagctggcggagctgctgcaggcggagctgctgaagagcaaagcgaattcgatcttatccttgctggtgcaggatctcaaaaaatcaaagttatcaaagttgtacgtgaaatcactggtcttggcttgaaagaagctaaagaacttgttgacaacactccaaaaccacttaaagaaggtattgctaaagaagaagctgaagagcttaaagctaaacttgaagaagttggcgcttctgtagaagttaagtaatcttcacttacctgtaggggaagctcgcttttatgaggcgagctttttctttgccattctttaagccatgaaaaaaaggaggttctaataatgagtgagcactattattcagaaaaaccttcagtgaaaagcaacaagcaaacctggtcttttaggcttcggaataaagatttcacgtttaccagcgatagcggggttttttctaaaaaagaagttgatttcggctcccgtctgctgattgattcttttgaagagcctgaggttgagggcggcattttggatgtaggctgcggatacggcccgattggtttatcgctcgccagcgactttaaagaccggactatccacatgattgacgttaatgagagagccgtagaactatcaaatgaaaatgcggaacaaaacggaataacaaacgttaagatttatcaaagcgatttgttttcaaacgttgattctgctcaaacatttgcttctattcttacaaatcccccaatccgagccggaaaaaaagttgtccatgctatctttgagaaaagcgctgaacacttaaaagcttcaggtgaattgtggatcgtcatacagaaaaagcagggcgcgccttctgccattgaaaagctcgaggaactgttcgatgaggtttctgtcgttcaaaaaaagaaaggctattatatcataaaagcaaaaaaagtttgactcggtattttaactatgttaatattgtaaaatgccaatgtatatattttgcttgatatgatgaattgtcaatatctatgtataaattatacaagtatggaaatgctaataaaatcggtatttgtttttggatgtggttttcttaattagaaacccttttttcttttgtcttgtaaaagtattttctttctttggaagaaatgcttattacacatataatacgcatgatttgaggggtgaatcagttgacaggtcaactagttcagtatggacgacaccgccagcgcagaagctatgctcgcattagcgaagtgttagaattaccaaatctcattgaaattcaaacctcttcttatcagtggtttcttgatgagggtcttagagagatgtttcaagacatatcaccaattgaggatttcactggtaacctctctcttgagttcattgattatagtttaggtgagcctaaatatcctgtagaggaatcaaaagaacgtgatgtgacttactcagctccgctaagagtgaaggttcgtttaattaacaaagaaactggagaggtaaaagaccaagatgtcttcatgggtgatttccctattatgacagatacaggtacttttatcattaacggtgcggaacgcgttatcgtttcccagcttgttcggtctccaagtgtatatttcagtggtaaagtagacaaaaacggtaaaaaaggttttaccgcaactgtcattccaaaccgtggcgcatggttagaatacgaaactgatgcgaaagatgttgtttatgtccgcattgatcgcacacgtaagttgccggttacggttcttttgcgtgctctcggcttcggctccgatcaagagattcttgatctcataggagaaaacgaatacctgcgaaatacgcttgataaagataacacagaaaacagcgacaaagcgttgctggaaatttacgagcgtctccgtcctggagagccgcctacagtagaaaatgcgaaaagcttgcttgattctcgtttctttgatccgaaacgatacgatcttgccaatgtaggacgctataaaattaataaaaaacttcatattaagaatcgcctcttcaatcagagacttgctgaaacgcttgttgatcctgaaacaggagaaatccttgctgaaaaaggccagattcttgatagaagaacacttgataaagtactgccatacttagaaaacggaatcggtttcagaaagctgtatccgaatggcggcgttgttgaagatgaagtgactcttcaatcaattaaaatctttgctccgactgatcaagaaggagaacaggttattaatgtaatcggcaatgcttacatcgaagaagagattaaaaacatcacgcctgctgatattatttcttcaatcagctacttcttcaacctgctgcacggagtaggcgacacagatgatatcgatcatcttggaaaccgccgtttacgttctgtaggcgagcttctccagaaccaattccgtatcggtttaagccgtatggagcgtgtggttcgtgagagaatgtcaattcaagatacgaatacaattacgcctcagcaactgatcaatattcgtcctgttattgcgtccattaaagagttctttggaagctcacagctttctcaattcatggatcagacgaacccgcttgctgaattaacgcacaagcgtcgtctgtctgcattaggaccgggcggattgacacgtgagcgtgccggaatggaagtgcgtgacgttcactactcccactatggccgtatgtgtccgattgaaacgcctgagggcccgaacatcggtttgatcaactcactatcatcttatgcaaaagtaaaccgttttggctttattgaaacgccatatcgccgcgttgaccctgaaacagggaaggtaacgggcagaatcgattacttaactgctgatgaagaggataactatgttgtcgctcaagcgaatgctcgtcttgatgacgaaggcgcctttattgatgacagcatcgtagctcgtttccgcggggagaacaccgttgtttccagaaatcgtgtagactacatggatgtatcacctaagcaggttgtatctgctgcgacagcatgtatcccgttcttagaaaacgatgactccaaccgtgccctcatgggagcgaacatgcagcgtcaggctgtgcctttgatgcagccggaagcgccatttgttggaactggtatggaatacgtatcaggaaaagactctggtgccgctgttatttgtaaacaccctggtatcgttgaacgcgtagaagcgaaaaacgtttgggttcgccgttatgaagaagtagacggtcaaaaagtaaaaggaaacctggataaatacagcctgctgaaatttgtccgctctaaccaaggtacgtgctacaaccagcgtccgatcgtaagtgtcggcgatgaagtggtaaaaggagaaatccttgctgacggtccttctatggagcttggtgaacttgcacttggccgtaacgtaatggtcggcttcatgacatgggatggctacaactatgaggatgccatcatcatgagtgaacgcctagtgaaggatgatgtttatacatctatccacattgaagaatacgaatcagaagcacgtgatacgaaacttggacctgaagaaatcactcgcgatattccaaacgtcggtgaagatgcgcttcgcaatcttgatgaccgcggaatcatccgtattggggcagaagtaaaagacggagatcttcttgttggtaaagtaacgcctaaaggcgtaactgaactgaccgcagaagaacgccttcttcacgccatctttggcgagaaagcccgcgaggttcgtgatacttctcttcgtgtgcctcatggcggcggcggaattatccatgacgttaaagtcttcaaccgtgaagacggagacgaacttcctccaggtgttaaccagttagtacgcgtatatatcgttcagaaacgtaagatttctgaaggagataaaatggccggtcgtcacggtaacaaaggtgttatctctaagattcttcctgaagaggatatgccttaccttcctgacggcacaccaattgatatcatgcttaacccgctgggcgtaccatcacgtatgaacatcgggcaggtattagaacttcacatgggtatggccgctcgttaccttggcattcacattgcatctcctgtatttgacggagcgcgagaagaggatgtctgggaaacacttgaagaagccggcatgtctcgtgacgccaaaacagtgctttacgacggacgtactggagagccgtttgataaccgtgtatctgtcggtatcatgtacatgatcaaactagctcacatggttgacgataaacttcatgcacgctctacaggtccttactcacttgttacgcagcagcctcttggcggtaaagcgcaatttggcggacagcgttttggtgagatggaggtttgggcacttgaagcttacggtgcggcttacactcttcaagaaattctgactgttaagtctgatgacgtggttggacgtgtgaaaacatacgaagccatcgttaaaggcgacaatgttcctgaaccaggtgttccggaatcattcaaagtattaatcaaagaacttcaaagcttaggtatggatgtcaaaatcctttctggtgatgaagaagaaatagaaatgagagatttagaagacgaagaagatgcgaaacaagctgacggcctggcattatcaggtgatgaagagccggaagaaacagcatctgcagacgttgaacgcgatgtagtaacaaaagaataatctctagttataaaggcaagtgacatcggttaatccgaagataaaaagggaggtaggccccttgctagatgtgaacaattttgagtatatgaacatcggtcttgcttcaccagataaaatccgttcatggtcttttggtgaagtgaaaaagcctgaaacgataaactatcgtacgttaaaacctgaaaaggacggtctattctgcgaacgcattttcggacctactaaggactgggaatgtcattgcgggaagtacaagcgagttcgttataaaggcgtagtttgtgaccgctgcggagtcgaagtaacacgggctaaagtccgtcgtgagagaatggggcacattgaactggctgccccagtttcccacatttggtatttcaaaggtattccaagccgtatgggccttgtgctggatatgtcacctcgtgctttagaagaagtcatttactttgcttcttacgttgtaactgatccggcgaatacaccgcttgaaaagaaacagcttctgtctgagaaagaataccgtgcttatcttgataaatacggtaataaattccaagcatctatgggtgctgaagcaattcataaacttcttcaagatatcgatcttgtaaaagaagttgatatgttaaaagaagagctaaaaacttcacaaggacaacgccgtactcgtgcgatcaaacgtcttgaagttttagaagccttccgtaactcaggaaacaagccttcttggatgatccttgatgtgcttcctgttattcctccggagcttagaccgatggttcagctagatggcggacgttttgcgacttctgatttgaatgacctttatcgtcgtgtcatcaaccgtaacaatcgtttgaaacgccttttggaccttggtgcgcctagcatcatcgttcaaaacgaaaagcgtatgcttcaagaggctgtcgatgccctaattgacaacggccgccgcggacgccctgtaacaggtcctggtaacagaccgttaaaatctctttctcacatgctgaaagggaagcaaggccgtttccgtcaaaaccttcttggtaaacgtgtcgattactccggacgttctgtaatcgttgttggtcctcatttgaaaatgtaccaatgcggattaccgaaggaaatggcgcttgaacttttcaaacctttcgttatgaaagaacttgttgaaaaaggtcttgctcacaacattaagagtgcgaaacgcaaaattgagcgcgtacagcctgaagtttgggatgtactagaatcagttattaaggagcacccggtactgctgaaccgtgcccctacacttcacagattaggtatccaggcgtttgaaccaacgcttgttgaaggacgcgcaatccgtcttcacccgctcgtatgtacagcttacaacgctgactttgacggtgaccaaatggcggttcacgtaccattatctgctgaagcacaagctgaagcacgcatcttgatgcttgctgctcaaaacatcttgaaccctaaagatggtaaaccagttgtaacaccgtctcaggatatggtactgggtaactattacctgacacttgagcgtgccggtgctgtcggtgaaggcatggtcttcaagaatacagacgaagcgcttcttgcttatcaaaacggatatgttcaccttcatacgagagtagctgttgcagctaactcacttaagaatgtgacatttaccgaagaacagcgctcaaaattgttaattacaactgtcggtaagcttgtcttcaatgaaattcttccggaatcattcccttacatgaatgaaccaacgaagagcaacattgaagagaaaacacctgaccgtttcttcttagaaaaaggtgctgacgttaaagctgttatcgcacagcagccaatcaatgcgccgtttaaaaaaggcattctgggaaaaatcatcgcggaaatctttaaacgattccatattacggaaacgtctaaaatgcttgaccgcatgaaaaacctaggtttcaaatattcaacaaaagctggtattacagttggggtttctgacatcgtcgtactcgatgataaacaagaaattcttgaagaagcgcaaagcaaagttgacaacgttatgaagcagttccgccgcggtcttatcactgaagaagaacgctatgagagagtcatctctatctggagtgctgcaaaagacgttatccaaggcaaactgatgaaatcacttgatgaactcaacccgatctacatgatgagtgactctggtgcccgtggtaacgcatctaactttacgcagcttgccggaatgcgcggcctgatggccaacccggctggacgtatcattgagttgccgatcaaatcaagtttccgtgaaggtctgacagtattggagtactttatctccacacacggtgcgcgtaaaggtcttgccgataccgctcttaaaactgctgactcaggttaccttacacgccgtctcgttgacgttgcgcaggatgttatcattcgtgaaactgattgcggaactgaccgaggcattcttgctaagcctcttaaagaaggaactgaaacaattgagcgcttagaagaacgcttaatcggacgttttgcaagaaaacaagtgaagcaccctgaaacaggtgaagtgcttgtgaatgaaaacgaactgatcgatgaagataaagcactggagattgtcgaagccggcattgaagaagtgtggatccgttctgccttcacatgtaatacgcctcatggtgtatgtaaacgatgctatggccgaaatcttgcaactggctccgatgttgaagtcggtgaagctgtcggaatcattgctgcccaatcaatcggtgagcctggtacacagttaacaatgcgtacattccatacaggcggggttgccggagacgatattacacagggtcttccgcgtatccaagagcttttcgaagcgcgtaatccgaaaggtcaggcaacaattacagaaatcgacggtactgtcgttgagatcaatgaagttcgtgataagcaacaggaaattgtggttcaaggcgcagtggaaacacgttcttatacggcaccttacaactcccgcctgaaagtagcggaaggagataaaattactcgaggccaagtactgacagaaggttcaatcgatccgaaagaacttcttaaagtaactgacctgacgactgttcaagagtatcttctccatgaggttcaaaaggtttaccgtatgcagggtgttgaaatcggtgataaacacgtagaagtaatggttcgccagatgcttcgcaaagtacgcgtgattgatgccggtgacactgatgtgcttccaggtacattgcttgatattcaccaatttactgaagcgaacaaaaaggtattgcttgaaggcaatcgacctgctacaggccgtcctgtcttactcggtattacaaaagcatctcttgaaactgattcattcttatctgctgcttccttccaggaaacaacacgtgtccttacagatgcagcgatcaaaggtaagcgtgacgagcttcttggcttgaaagagaatgttatcatcggtaagcttgttccagctggtacaggaatgatgaaataccgtaaagtaaaaccagtatcaaatgttcagccgactgacgatatggtcccggttgaataactgatttaatgctgctgaaagactgcaaaaacagtctttcagcagatatatttatgaaaaagtcactctatgagaagaacgaaactaaaaaatgtcataccttgttgacattcgtctcctagaatgataatataaccaaggtgctcgaaataaacctgttactttggaggatatgtttatgtcttatgataaagtatcacaggccaaatcaattattattggtacgaagcaaacagtgaaagctctaaagcgaggttcagtaaaggaagtagtcgttgcaaaagacgcagatccgatactcacgtcaagtgttgtttcacttgctgaagatcaaggtatctctgtctcaatggttgaatccatgaaaaagctcggcaaagcctgcggaattgaggtaggagcagccgctgttgccattattctataacgtacttttgtttttgcgtaagattccatcttgtgtaaagacattgttttttgccttttgatgaaccacctgggtatgtgggttataaaacgcaatgaagggaggaaaaattcatgcctacaattaatcagctaattcgcaaaggacgcgtgagtaaagtagaaaactcaaagtctcctgcacttaacaaaggatacaacagctttaaaaaagagcacactaacgtatcttctccacaaaaacgcggggtatgtactcgtgttggtacaatgacaccgaaaaaaccgaactcagcacttcgtaaatatgctcgtgttcgtttgactaacggaatcgaggttactgcttacattcctggtatcggtcacaacctgcaagagcacagtgttgtacttatccgcggcggacgtgtaaaagacttaccaggggtacgttaccacatcgttcgtggtgcgcttgatactgctggagttgaaaaccgtgcacaaggccgttctaaatacggtacgaaaaaacctaaagcaaaataatatacgaaaatacgcataattgatgaagggaggatattcagatgccacgtaaaggtcctgtagcaaaaagagatgttttacctgatccgatttacaactctaagcttgtatctcgtctaatcaacaaaatgatgatcgatggtaaaaaaggtaagtctcaaacaatcctatacaagtcattcgatatcattaaagaacgtactggcaatgatgcaatggaggttttcgaacaagcattgaaaaacatcatgcctgtacttgaagtaaaagcacgccgtgtaggtggtgcgaactaccaagttcctgtagaagttcgtcctgaacgtcgtacgactcttggacttcgctggttagttaactacgctcgtcttcgcggagaaaaaacgatggaagagcgtttagctaacgaaatccttgacgcagctaacaacactggtgctgctgttaagaaacgtgaagacactcataagatggctgaagcaaacaaagcatttgctcactatcgctggtaggatttatagattaacaaaacacaatttcctaataaggaaggagaaattacccaatggcaagagagttctccttagaaaaaactcgtaatatcggtatcatggctcacatcgatgccggtaaaacgacaactacagaacgtatcttgttctatactggtcgtatccacaaaattggtgaaactcatgaaggagcttcacaaatggactggatggagcaggaacaagaacgtggtatcacaatcacttccgctgcgacaactgcacagtggaaaggataccgcgtaaacatcatcgatactccaggacacgtagacttcacagttgaagttgaacgttctcttcgtgtacttgatggtgctgttgctgtacttgacgcgcaatcaggcgttgagcctcaaacagaaactgtttggcgtcaggcaacaacttatggagtaccgcgtatcgtttttgttaacaaaatggacaaaatcggtgcagacttcctttactctgtaggaactttaagagaccgtcttcaagcaaacgctcatgcaattcaattgccgatcggtgctgaagataacttcgaaggtatcattgaccttgtagaaaacgttgcgtatttctacgaagatgacctcggaactcgttctgatgcaaaagaaatccctgaagagtacaaagagcaagctgaagagcttcgcaacagccttattgaagctgtatgtgagcttgatgaagagcttatggataagtaccttgagggtgaagaaatcacaattgacgagttaaaagcaggaattcgtaaaggtacattaaatgttgaattctaccctgttcttgttggttctgctttcaaaaacaaaggtgttcaactagtacttgatgctgttcttgactaccttcctgcaccaactgacgttgctgcaatcaaaggtacacgtcctgatacaaatgaagagattgagcgtcattcttctgacgaagagccattctctgcattagcatttaaagttatgactgacccttacgttggtaagttgacgttcttccgtgtgtactctggaacacttgattctggttcatacgtgaaaaactctactaaaggcaaacgtgagcgtgttggacgtattcttcaaatgcacgctaacagccgtgaagaaatctctactgtatacgcaggggatatcgcagctgctgtaggtctaaaagatacaactactggagatactctatgtgatgagaaggatcttgttatccttgagtcaatggaattcccagaaccagttatcgacgttgctattgagcctaaatcaaaagctgaccaagataaaatgggtatcgctttagcgaaacttgctgaagaagatcctacattccgtactcaaacaaacccagaaactggccaaacgatcatctctggtatgggtgaacttcaccttgatatcattgttgaccgtatgaaacgcgaatttaaagtagaagccaacgttggtgctcctcaagttgcgtaccgtgaaacattccgtaccggtgcaaaagttgaaggtaaattcgtacgtcagtctggtggacgcggtcagttcggacacgtttggatcgaattcgaaccaaacgaagaaggcgctggctttgaatttgaaaatgcgattgtcggtggggttgttcctcgtgaatacatcccagctgttcaagcaggtctggaagatgcacttgaaaatggtgtactagcaggcttcccgcttatcgacattaaagctaaacttttcgacggttcttaccatgatgttgactcaaacgaaatggcatttaaagttgctgcttctatggcattgaaaaatgcagtcagcaaatgtaacccagttcttcttgaaccaatcatgaaagtagaagtggttattccagaagaatacatgggagatatcatgggtgatatcacttcacgtcgcggacgcgtagaaggtatggaagcacgcggtaacgctcaagttgttcgcgctatggttcctcttgctgaaatgttcggttacgctactgcacttcgttctaatacgcaaggtcgcggtacgttcactatgcacatggatcactatgaagaagtgccgaagagcgtcgcagaagaaattatcaaaaaaaataaaggcgaataattgattttgccgcttaactcaagtataactactattgtaagatgaggaagtgaaagctttctttcacttcctatcactctatacattactaattaaaagctcttaaggaggattttagaatggctaaagaaaaattcgaccgttccaaatcacatgccaatattggtacaattggacacgttgaccatggtaaaacaactttaactgctgctatcacaacagtacttcataagaaatctggtaaaggtacagctatggcgtacgatcaaattgatggtgctccagaagaacgtgagcgcggtatcacaatctctactgcacacgttgagtacgaaactgaaactcgtcactatgcacacgttgactgcccaggacacgctgactatgttaaaaacatgatcactggtgctgctcaaatggacggagctatccttgtagtatctgctgctgatggcccaatgccacaaactcgtgagcacatccttctttctaaaaacgttggtgtaccatacatcgttgtattcttaaacaaatgcgacatggtagacgacgaagagcttcttgaactagttgaaatggaagttcgcgatcttcttagcgaatacgacttccctggtgatgatgtaccagttgttaaaggttctgctcttaaagctcttgaaggagacgctgagtgggaagctaaaatcttcgaacttatggatgcggttgatgagtacatcccaactccagaacgcgacactgaaaaaccattcatgatgccagttgaggacgtattctcaatcactggtcgtggtacagttgctactggccgtgtagaacgcggacaagttaaagtcggtgacgaagttgaaatcatcggtcttcaagaagagaacaagaaaacaactgttacaggtgttgaaatgttccgtaagcttcttgattacgctgaagctggtgacaacattggtgcccttcttcgcggtgtatctcgtgaagaaatccaacgtggtcaagtacttgctaaaccaggtacaatcactccacacagcaaattcaaagctgaagtttacgttctttctaaagaagagggtggacgtcatactccattcttctctaactaccgtcctcagttctacttccgtacaactgacgtaactggtatcatccatcttccagaaggcgtagaaatggttatgcctggagataacactgaaatgaacgttgaacttatttctacaatcgctatcgaagaaggaactcgtttctctattcgtgaaggcggacgtactgttggttcaggcgttgtttctacaatcactgagtaatagtatgattttaaacgagacccctgcgggtctcgttttttgtttgcttatctttttcttgtataataggatctatcatattcgaggggttaatatttatgattcctgaaaagaaatcaatcgcaatcatgaaagaaataagcattggaaatacaaagcaaatgctgatgattaatggagatgacgtgaaaaatccattgctgctttttttacatggcgggccgggaacgccgcaaatcggatatgttagacattatcaaaaagagctggaacagtattttacagtagttcattgggatcagagaggatcggggctttcttattctaagcgaatttcgcatcactctatgacaataaatcacttcattaaagatacaatccaagtcactcaatggcttttagctcatttttcaaaatcaaaactttacctagccggtcattcgtgggggtcaatactggcgcttcatgtgctgcagcagtgtcctgctttattttacgcgtattatggaatcagccaggttgttaacccccacgatgaagaatcaactgcttatcaacatattcgtgaaatttctgaatcaaaaaaagccagcttattatctttcctcacacgtttcattggtgctccgccttggaagcaggatatccagcaccttatctatcggttttgtgtcgagctaagcaggggaggattcactcgtcgtcatcgtcaatctctagctgtaatatttcaaatgcttactggcaatgagtatggagtgcggaacatgcacagcttctttaatggattgcgcttcagtaaaaaacatttaactgatgagttgtaccggtttaatgcttttacatcagttccttctattaaagtaccgtgtgttttcatttcagggaaacatgacttaattgttcctgctgaaatatcgaaacagtattatcaagaacttgaggcacccgaaaagcgctggtttcaatttgagaactcagctcacaccccgcatattgaggaaccgtcattattcgcgaacacattaagtcgacatgcacgacaccatttatgatagatccttgataaataagaaaaacccctgtataataaaaaaagtgtgcaaaccatgcatattttaaataagtcttgcaacatgcgcctattttctgtataatggtgtatgttggtctttgactgcgatgaagtgagaggttgctgacacacccggccgctttgccatggcaaggtgttcaggtttttctcacggagaactgtctaacgtgatgtaggcgaaaaggagggaaaataatggcaaaacaaaaaattcgtattcgtttgaaagcatatgatcatagaatccttgatcaatctgcagagaagattgttgaaacggcaaaacgttctggtgccagcgtatctggtccgattccgttgccaactgaaaaatcagtttacacaatccttcgtgcggtgcacaaatacaaagattctcgtgagcaatttgaaatgcgtacacataaacgtttaatcgacattgtgaacccaacaccacaaactgttgatgctcttatgcgattagacttaccatctggtgtcgatatcgaaattaaactttaattctaaaatatagaatgatcttaataggaggtgtgacgaatgaccaaaggaatcttaggaagaaaaattggtatgacgcaagtattcgctgagaatggtgatcttattccggtaactgttatcgaggctgctccaaacgttgttcttcaaaagaaaacagctgaaaacgacggttatgaagcaatccagcttggttttgacgacaagcgtgaaaagctttctaacaaacctgaaaaagggcacgttgcaaaagcggaaactgctcctaagcgcttcgttaaagaattacgcggagtggaaatggatgcgtatgaagttggtcaggaagtcaaggttgaaattttctctgctggagaaatcgtagatgtaacaggagtatctaaaggtaaaggtttccaaggtgcgatcaagcgccacggacaatctcgcggacctatgtctcacggttcacgctaccaccgtcgtcctggttcaatgggacctgtagatcctaaccgtgtattcaaaggtaaattattacctggacgtatgggcggagagcaaatcactgttcaaaaccttgaaatcgtaaaagttgatgcagaacgcaatcttcttttgatcaaaggtaacgtacctggtgcgaagaaatctttaatcactgttaaaagtgctgttaaatctaaataattctcttaggaaaggaggaaattgattatgccaaaagtagcattatacaaccaaaacggttctactgctggtgacatcgaattaaacgcttctgtatttggtatcgaaccaaatgagagtgttgtattcgacgctattcttatgcaaagagcttccttacgtcaaggaactcacaaagtaaaaaatcgttctgaagtacgcggcggaggtcgtaaaccatggcgtcaaaaaggtactggacgtgcccgtcaaggttcaatccgttcaccgcaatggcgcggaggtggtgtcgtattcggcccaacaccacgcagctattcttataaattacctaaaaaagttcgccgcttggcaatcaaatcagtattgtcttctaaagtgaacgacaacaacatcatcgttcttgaagatcttactcttgatacggctaaaacaaaagaaatggcagctatccttaaaggattatctgttgagaaaaaagctttaatcgtaactgcggatgcaaacgaagcagtagctttatctgctcgtaacattcctggagttactgttgttgaagctaacggaatcaacgttttagacgttgtcaaccacgagaagcttctgattacaaaagcagcggttgaaaaagtagaggaggtgcttgcataatgaaagatcctcgtgatgttctaaagcgccccgtcattactgaacgttctgccgatttaatgactgaaaaaaaatatacttttgaagttgatgtaagagctaacaaaacagaagtgaaagacgcggttgaaagcatctttggagtgaaagttgacaaagtcaacatcatgaactacaaaggcaaatcaaaacgtgttggacgctacactggtatgactagccgtcgcagaaaagcgatcgtaaaacttactgcagacagcaaagaaatcgaaatttttgaagcttaattatctgtaaaaagaaggagggaaattcaaaatggcgattaaaaagtataaaccgacctctaatggacgtcgtggcatgacaacttcagattttgccgaaatcacgactgacaagccggaaaaatccttgcttgctccccttcacaaaaaaggcggacgtaacaaccaaggtaaattgactgtacgtcaccaaggtggcggacataaacgccaataccgtgttatcgacttcaaacgcgataaagatggtatacctggacgcgttgctacagttgaatacgatccaaaccgttcagctaacatcgctctaatcaactatgcagacggagaaaaacgttacattcttgctcctaaaggaattcaagtaggtactgaaatcatgtcaggtcctgaagctgacattaaagtaggtaatgcacttccacttatcaacatccctgttggtacagttgtgcataacattgaattaaaacctggtaaaggcggacagcttgtacgttcagctggtacatctgctcaggttcttggtaaagaaggtaaatacgttcttgtacgtcttaactctggtgaagttcgcatgatcctttctgcttgccgtgcttctatcggtcaagtaggtaacgaacagcacgaacttatcaacattggtaaagctggacgttctcgctggaaaggcatccgtcctacagttcgtggttctgtaatgaaccctaacgatcacccacacggtggtggtgaaggacgtgcgccaatcggacgtaaatcaccaatgtctccatggggcaaaccaactcttggattcaagactcgtaagaaaaagaacaaatccgataaatttatcgtacgtcgtcgtaaaaataaataacggggttgtctacggttcttttcggaccgtagtgcaatcacgaagggaggttccaaaatggctcgcagcttaaaaaaaggaccatttgtcgatggacacttgatgactaaaatcgagaaattaaatgaaacagacaagaaacaagtcgtaaaaacttggtctcgtcgttctactattttcccacagtttattggtcacacaatcgcagtctatgacggacgtaaacacgtgcctgtattcatctctgaagatatggtagggcacaagttgggtgaattcgctccaactcgtacgtacaaaggtcatgctagtgatgacaaaaaaacaagacgctaagagaggaggcttttaaatgcaagctaaagctgttgcaagaacagtccgtattgctcctcgtaaagcacgtctagtaatggacctgattcgaggcaagcaagtaggtgaggcagtatcaatcttgaaccttacaccaagagctgcttctccaattatcgagaaagtattaaaatccgctattgcaaatgctgagcataactatgaaatggacgctaacaacctggttatttctcaagcattcgttgacgaaggccctacgttaaaaagattccgcccacgtgctatgggacgtgcgagccaaatcaacaaacgtacgagccacattacaatcgttgtatcagaaaagaaggagggataagtagtgggtcaaaaggtaaatccagtcggtcttcgtatcggagtcattcgtgattgggaatctaagtggtacgctggtaaagattacgctgacttcctgcacgaagatttaaaaattcgtgaatacattagcaaacgcctttctgacgcttctgtttctaaagtagaaatcgagcgtgcagcaaaccgcgttaacattacgatccacacagctaagcctggtatggttatcggtaaaggcggttctgaagtcgaagcacttcgcaaagcccttaacagccttactggcaagcgtgtacacattaacattcttgaaatcaaaagagcagatcttgatgcacagctagttgctgacaacatcgctcgtcaattagaaaaccgtgtttctttccgccgtgcgcagaaacaacaaatccaacgtactatgcgtgctggagcacaaggtgtgaaaacaatggtttctggtcgtcttggcggtgcagatatcgctcgttctgaatactacagtgaaggaactgttccattgcacacattacgtgcggacattgactatgcaacatctgaagctgatactacttacggtaagcttggtgtaaaagtctggatctatcgtggagaggttcttcctactaagaagaaaaatgaggaaggaggaaaataatatgttattaccaaaacgcgttaaatatcgcagagagcatcgcggaaaaatgcgtggccgtgcgaaaggcggtactgaagtacatttcggagaattcggtatccaagctcttgaagcttcttggattactaaccgtcaaatcgaagctgcacgtattgcgatgactcgttacatgaaacgtggcggtaaagtttggatcaaaattttcccttctaaaccttacactgctaaaccacttgaggtacgtatgggatccggtaaaggggctccagaaggttgggtagctgttgtaaaaccgggcaaagttttatttgaaatttctggtgtgtctgaagaggttgctcgtgaagcgcttcgccttgcatctcacaaattgccaattaaaacgaagttcgtaaaacgtgaagaaattggtggtgaatcaaatgaaagctaatgaaattcgtgaccttaccactgctgaaattgaacaaaaagtaaagtctcttaaagaagaacttttcaatcttcgctttcaattagcgacaggacaacttgaaaatactgctcgcattcgtgaagtgcgcaaagctatcgcgcgcatgaaaactgtgattcgtgaaagagaaattgctgctaataaataatcactgaggggaggtcgtgagcatgagcgaacgtaaccaacgcaaagtttaccaaggccgtgttgtttctgacaaaatggataaaaccattactgttgttgttgagacatacaaaaaacatacactttacggtaaacgcgtaaaatactcaaaaaaattcaaagcacatgatgaaaataatcaagctaaaatcggtgacatcgttaagatcatggaaactcgtccattgtctgcaactaagcgtttccgtctagttgaagttgtcgaagaagctgttattatctaataaagttcggaattctttttccgaagggaggtaacaaataatgattcaacaagagactcgtttaaaagtagctgacaactctggcgcacgtgaagtacttactattaaagttcttggtggttctggacgtaaaacagctaacattggtgatgtaattgtttgcacggttaaacaagcaacaccaggaggcgttgtcaaaaaaggtgaagtcgtaaaagctgttatcgttcgcactaaaagcggagcgcgcagaagtgacggttcatacatcagcttcgatgagaatgcatgtgttatcatccgtgacgacaagagcccacgcggaactcgtatcttcggaccagttgctcgtgaattgcgtgaaaacaactttatgaaaattgtttctctagctccagaagttatctaatgaaataaatgccttactcaaggaggtgcgatcaggatgcatgtaaaaaaaggcgataaagttatggttatctctggtaaagataaaggcaaacaaggaacaatccttgctgctttccctaaaaaggaccgcgttttagttgaaggtgttaacatggtaaagaaacactctaaaccaactcaagctaaccctcaaggcggtatttctaatcaagaggcgccaattcatgtatcaaacgttatgccgctcgatcctaaaacaggtgaagtgactcgcgtaggatacaaagtggaagatggcaaaaaagttcgtgtagcaaaaaaatctgggcaagttctagataaatagtattaaaaggaagggaggtctatctcatgaaccgccttaaagaaaagtacaataaagaaattgcacctgctttaatgactaagttcaactatgattcagtcatgcaagtgcctaaaattgaaaaaatcgtaatcaacatgggtgttggtgacgctgttcaaaacgccaaagcaatcgacagtgctgttgaagaattaacgtttatcgcaggtcaaaaacctgtcgttactcgtgcgaagaaatcaattgctggattccgtcttcgtgagggaatgcctatcggtgcgaaagtaactcttcgcggagagcgcatgtatgatttccttgataaacttatttctgtatctttaccgcgtgtacgtgacttccgcggggtttctaaaaaatctttcgacggtcgcggtaactacacacttggtatcaaagaacagttaatcttccctgaaattgactacgataaagtaacaaaggttcgcggaatggacatcgttatcgtaacaactgctaatactgacgaagaagctcgtgagctattaactcaagtaggtatgccgttccagaaataatcaatgaaagggaggcgaaatcgtggctaaaaagtctatgattgcgaaacaacaacgtacaccaaagtttaaagtacaagagtacacacgctgtgaacgctgcggacgtccgcattcagtcattcgtaaatttaaactttgccgtatttgtttccgtgagcttgcatataaaggacaaattcctggcgtgaaaaaagccagctggtaatccccaagaaagggaaggaggtaattatataatggttatgacagatccaattgcagatatgctaactcgtattcgcaatgcaaacatggtacgtcatgagaagcttgaaattcctgcttctaaattgaaaagagaaattgctgaaattttaaagcgtgaaggtttcattcgtgacgttgagttcgtagaagacagcaaacaaggtatcatccgcgttttcttgaaatacggacaaaacaacgagcgcgttatcactggtcttaaaagaatcagcaagcctggtttgcgtgtttatgctaaatctaatgaagtaccccgcgtacttaacggtcttggaatcgcgattatttctacatcacaaggtgttttaacggacaaagaagcccgtgcaaaacaagctggtggagaagttctagcatacgtttggtaagaagtttaacatgaatggaggtgtttggtatgtctcgtgtaggtaagaagctacttgagattccttctgatgttacagtaacgttaaatgataacaacactgtagctgtgaaaggaccaaaaggagaattaactcgtacgtttcaccctgatatggagattaaagtagaggacaatgtgcttacagtcgctcgtccttctgatcaaaaagagcaccgtgccctgcatggtacgactcgcagtctgcttggcaacatggttgaaggtgtatctaaaggatttgaaagaggtttggaattagtcggtgtcggttaccgtgcttctaaatccggaaataaacttgttttaaacgttggatactctcatcctgttgagatcgttcctgaagaaggcatcgaaatcgaagttccttctcaaacaaaagtagttgtaaaaggtacagacaaagaacgcgtaggagctattgctgctaacatccgcgctgtacgttctccagagccttacaaaggtaaaggaatccgctacgaaggtgaagttgttcgccgtaaagaaggtaaatctgctaagtaagatcgcttaaagtgaagaaaggagtgacctagatgattacgaaaactagcaaaaatgctgctcgtcttaaaagacacgctcgtgttcgcgctaaactttccggtactgctgaaagaccgcgcctgaacgttttccgttctaacaagcacatttacgctcaaatcatcgatgatgtaaatggtgtaacacttgctagtgcatctactctcgataaagacttgaacgttgaaagcactggagatacttctgctgctactaaagttggagaattagttgcaaaacgcgctgctgaaaaaggcatttctgacgtagtatttgaccgtggcggatacttataccatggacgtgtaaaagctttggctgatgccgctcgtgaagctggacttaaattttaataaaagaaggagggacacatgattatgcgtcgtattgacccaagcaaattagagttagaagaacgcttagttacggttaaccgcgtagcgaaagttgttaaaggtggtcgtcgtttccgcttcgcagctctagtcgttgtcggtgacaaaaacggacacgtaggattcggtactggtaaagcacaagaagtaccagaagcgattcgcaaagctgttgaagatgcgaaaaagaatttgattgaagtaccaatggttggaactacaattccacacgaaatcatcggacgtttcggtgcaggtaacatcttgttaaaacctgcttctgaaggtactggagttatcgctggaggccctgtacgtgcggtacttgagctagctggtgtagctgatatcctttctaagtctttaggttctaacacaccgatcaacatgattcgtgcaacacttcaaggtttaagtgaacttaaacgtgctgaagacgttgcgaagcttcgtggaaaatctgtagaagaactgttaggataaggagggaacattaatggctaaattagaaattaccctcaaacgaagtgtaatcggtcgcccggaagaccaacgcgttactgtaagaacacttggtttaaagaaaacaaaccaaactgttgttcatgaagacaacgctgcgatccgtggtatgattaataaagtatctcatttagtttctgttaaagaacaataaaaatatttgatcggataaggaggtgtcctaatgaaacttcatgaattaaaaccttcagaaggttcacgcaaaacgcgtaatcgcgtaggtcgtggtattggttctggcaacggtaaaacagctggtaaaggtcacaaaggtcaaaacgctcgttctggcggcggtgtacgccctggattcgaggggggacaaatgcctttattccaacgtcttcctaaacgcggtttcactaacatcaaccgcaaggaatacgctgtagtcaacctagacaaattgaacggttttgcagaaggaacggaagtcactcctgaacttcttctagagactggtgttattagcaaacttaatgcaggagtaaagattcttggcaacggtaaattagagaaaaaattaactgtaaaagccaataaattctctgcttctgcgaaagaagctgttgaagctgctggcggtacagctgaggtgatctaacttgtttaaaacaatctccaactttatgcgtgtgagtgatatcaggaataaaatcatattcactttactcatgcttatcgtctttcgcataggtgcgtttattcctgtgccttacgttaacgctgaagcgttacaggcgcagtctcaaatgggtgtttttgatctccttaatacatttggcggcggtgcgctttaccaattttccattttcgcaatgggaattactccttatatcacggcttcgatcatcattcagctgcttcagatggatgttgtaccgaagtttaccgagtggtctaagcaaggtgaagttggccgccgtaaattagctcagttcacaaggtactttacgattgtgcttggtttcatccaagcattaggtatgtcatatggatttaacaatctggcaaacggtatgctgatcgaaaaatccggtgtatcgacatatcttatcattgctttagtgctcactggcggaactgcctttttaatgtggcttggggaacaaattacttctcatggagtaggcaacggaatatcgatcattatcttcgcggggattgtgtctagtattccaaaaacaattgggcaaatatatgagactcaatttgtcggcagcaacgatcagttgtttattcatattgtgaaagtcgcacttcttgtgattgcgattttagcagttattgttggagttattttcattcagcaagccgtacggaaaattgcgattcaatatgctaaaggcacaggtcgttcacctgctggcggaggtcagtctacacaccttccattgaaagtgaatcctgcaggggttattccggtaatctttgcggttgcgtttttgataacgccgcggacgatcgcgtcattctttggaacaaacgatgtgacaaagtggattcaaaacaactttgataatacgcatccggtgggtatggcgatatatgttgcgttgattattgcctttacgtacttttatgcttttgtacaggtaaaccctgaacaaatggctgataaccttaaaaaacagggtggctatatcccgggggttcgtccagggaaaatgactcaagatagaattacgagcattttgtatcgacttacgtttgtgggttctatattcttagccgtgatttccattcttcctatctttttcattcaattcgctggattgcctcaaagtgcacaaattggcggaacatctttgttaattgttgtcggggtagccttggagacaatgaaacaactagaaagccagttggtgaaacgaaactaccgtggatttatgaaaaactagaggaaatggatttatccattccctcttaataaagagaggacgggggaaatccgaatgaacttagtcttaatggggcttcctggtgccggtaaaggcacacagggcgaacgaattgttgaggattatgggattcctcatatctcaacaggagatatgttccgtgctgctatgaaagaagaaacaccactcggactcgaagcaaaatcttatattgataagggagagctcgtacctgacgaagtcacaatcggaattgtaaaagagagacttggcaaagatgattgtgaaagaggttttcttctggacggatttccgcgaacagtcgctcaagccgaagctcttgaagaaattcttgaggaatacggcaagccgattgattatgtcattaacattgaagtcgacaaagacgctcttatggaacgtctgactggacgcagaatttgcagtgtttgcggcacaacctatcatttagtctttaatccgccgaaaacgccgggtatttgtgataatgacggaggcgaactctatcaacgggcagatgataatgaggaaacagtctctaaacggcttgaggtaaacatgaagcaaactcagcctttactcgatttctattcagagaaaggttatcttgcaaacgtgaatggccagcaggacattcaagacgtttatgcagatgtgaaggatcttcttggaggattaaaaaaatgattatctgtaaaaccccacgtgaacttggtatcatgcgggaagcagggcgaatcgtggctttaactcatgaagagttaaaaaagcacattaaaccaggaatctcgacaaaagaattggatcaaattgccgaacgttttattaagaagcagggtgcaatcccatcttttaaggggtataatgggtttcgcgggagcatttgcgtatcagttaatgaagaactcgttcacggcatacctggcagcagggtgctgaaggacggtgacatcatcagtattgatatcggtgctaaattaaatggttatcatggtgactctgcatggacatatccggtaggaaacatcagcgatgatgacaaaaaacttctggaagtgacagaggagtctttatataaaggcttgcaggaagcaaaaccaggtgaacgtttgtcgaatatttcccacgcaatacaaacgtatgtcgaaaatgagcagttttcagttgttagggagtatgtcggacatggtgttggtcaagacttgcatgaggacccgcaaattcctcattacggtccgcccaacaaaggaccacggcttaaacctggcatggttctcgctattgaacctatggtgaacgctggcagccgctacgtgaaaacattggctgataactggacggttgtaacggtagatgggaaaaagtgtgctcattttgaacatacgattgcgattacggaaacgggttttgatatactgacgagagtctagatgatgaaaataattccgaagacagatgtttttcaagcttgatagggcagaaagcttgggtgaacattggcaagaccgaattcatcttgctgcttgtcgttggaattttaaccatcatcaatgtactaacagcagacggagaaaagcgtacatttcattctcctaagaaaaagaatatcaatcatttaaccctttatgattgcgtatctccggaagttcagaacagtataaacgaaacagggcgtgtgacaaacttcttttgaaatttgtcagaaagcaagttactgatttgaagaagggagaacacttgaatggcgaaagacgatgtaattgaagtggaaggtactatagtcgaaacactgccaaacgcgatgttcaaagttgaacttgaaaatggccacactgttttggctcatgtatctggtaaaatccgcatgcacttcattcgcattttacctggagacaaagttacggtagaattatctccatatgacttaactcgtggcaggattacgtaccgttacaaataaagcactccggaaactgaaggaggttggaaacacatgaaagtgagaccatcagttaaaccaatctgcgaaaaatgtaaagttattcgcagaaaaggaaaagtaatggtgatctgtgaaaatccaaagcataaacaaaaacaaggataatttataaggaggtgcccagagaatggctcgtattgctggtgtagatatcccacgtgacaaacgtgttgttatttctttaacatacatcttcggaattggacgcacaacggctcagcaagttttaaaagaagctggagtttcagaagatactcgtgtgcgcgatcttactgaagaagaacttggtaaaatccgtgatattattgacaaactgaaagtagaaggtgaccttcgccgtgaagtttctcttaatatcaaacgtctgatcgaaatcggaagctaccgcggaatccgtcatcgcagaggattacctgttcgcggacaaaactctaaaaacaatgcgcgtactcgtaaaggtccgcgtcgtactgtagctaacaagaaaaaataagtaagggaggttcttaaacaatggctgctgctcgtaaatctaacacgcgtaaacgtcgcgtgaaaaagaatattgagtctggaattgctcatattcgttcaactttcaataacacgatcgttacgatcactgacactcatggtaatgctatttcttggtctagtgccggagctttaggattcagaggttctcgtaaatctactccttttgctgcgcaaatggctgcagaaacagctgctaaaggttcaatcgaacatggtcttaaaactctagaggttactgttaaaggacctggttcaggccgtgaagctgcaatccgtgcacttcaagctgctggactagaagtcactgctatcagagacgtaactcctgttcctcataacggatgccgtccaccaaaacgtcgccgcgtgtaatttgtttgtatagattttgtgtccctgtcaataatgggttatgatacagttatttatgaaacgaatgcaccgactcgttgcctgagcacatacgggactaaacaatggggaatttcggatggaatctcatatgattctattcgaggtttcgacgttttgaaggagggttttaagtaatgatcgagattgaaaaaccaaaaatcgaaacggttgaaatcagcgacgatgccaaatttggtaagtttgtcgtagagccacttgagcgtggatatggtacaactctgggtaactccttacgtcgtatcctcttatcctcactccctggtgccgctgtaacatcaatccagatagatggtgtactgcacgaattctcgacaattgaaggcgttgtggaagatgttacaacgattatcttacacattaaaaagcttgcattgaaaatctactctgatgaagagaagacgctagaaattgatgtacagggtgaaggaactgtaacggcagctgatattacacacgatagtgatgtagagatcttaaatcctgatcttcatatcgcgactcttggtgagaatgcgagtttccgagttcgccttactgctcaaagaggacgtgggtatacgcctgctgacgcaaacaagagagacgatcagccaatcggcgtgattccgatcgattctatctatacgccagtttctcgtgtatcttatcaggtagagaacactcgtgtaggccaagttgcaaactatgataaacttacacttgatgtttggactgatggaagcactggaccgaaagaagcaattgcgcttggttcaaagattttaactgaacaccttaatatattcgttggtttaactgacgaagctcaacatgctgaaatcatggttgaaaaagaagaagatcaaaaagagaaagttcttgaaatgacaattgaagaattggatctttctgttcgttcttacaactgcttaaagcgtgcgggtattaacacggttcaagagcttgcgaacaagacggaagaagatatgatgaaagttcgaaatctaggacgcaaatcacttgaagaagtgaaagcgaaactagaagaacttggactcggacttcgcaaagacgattgactagtttcccttgtgaactaggattttcgtgtgtttattattcagaaacagcattccaataaaggaggggacatcacatgtcatacagaaaactaggacgtacgagtgcacagcgtaaagctatgcttcgtgatcttacaactgatttgatcatcaacgaaagaatcgaaacaactgaaacacgtgcgaaagaacttcgctctgtagttgaaaaaatgatcacgcttggcaaacgcggtgatcttcacgctcgccgtcaagctgctgcatacatccgcaacgaggttgcaaacgaagaaaataaccaagatgcacttcaaaaattattctctgacattgcaactcgttacgaggagcgccaaggtggatacacacgtattatgaagcttggtcctcgccgtggtgacggagcaccaatggcaattatcgaattggtttaatcacatatttttgtgtatctaaagaagggcgggacagtttctaactggatctatgccctttttttagatactgtaacttttaatagagagaaaagcagagcattagctgagaggaggccggttttccatgaatcaaaatcagttgatatcggtagaggatatcgtatttcgatatcggaaggacgcagaaagacgagcactagacggcgtctccctgcaggtgtatgagggtgaatggcttgcaatcgtaggtcataacggttcagggaaatcaacactggcccgcgcattgaatggtttaattcttcctgaatcaggcgacattgaggttgccgggattcaattgacagaggaatccgtttgggaagtgcgtaagaagataggtatggtctttcaaaatccggataaccaatttgtcggaacgactgttcgcgatgatgtggcttttggtttagaaaacaatggtgtaccgcgggaagaaatgattgagagagtagactgggcagtaaaacaggtgaatatgcaagattttctcgatcaagagccgcaccatctctccggaggccaaaagcagagagttgcgattgcgggggttattgccgcacgtcctgatattattatcttagatgaagcaacatccatgcttgatccgatcgggcgagaagaagtgcttgaaacggtaagacatctaaaagagcagggcatggcgactgtcatatccattacacatgatctgaatgaggcagcaaaagcagacaggatcattgtcatgaatggcggtaaaaaatatgctgaagggccgcctgaagagatttttaaattgaataaagaacttgttcgaattgggcttgatttacccttctcattccagcttagccagcttttaagagaaaatggactggatttggaagaaaaccatttgactcaggaagggctggtgaaagagctgtggacattacaatcaaagatgtagagcatcgctatcagatgaagacgccgtttgagcgcctagcactgtatgatatcaatgcatcgattaaagaaggaagctacgtagccgttatcgggcatacaggctctggcaagtccactcttcttcagcacctaaatggtctcctgaagccgacgaagggacagatatcactaggtagcactgtcattcaggcagggaaaaagaataaagatctgaaaaaacttcgtaaaaaagtcggaatcgttttccaatttcctgagcatcaattattcgaagaaacagttcttaaagatatttcattcggaccgatgaactttggtgttaaaaaagaagatgctgaacaaaaagcgagagagatgctgcagcttgtaggtttatcagaagagcttttggacaggtcaccctttgaattaagcgggggacaaatgcgcagagttgcaattgccggcgtacttgcaatggaccctgaagtgcttgttctggatgaaccgactgcaggattggacccaagagggcgaaaagagattatggacatgttttatgagcttcatcaacgtgggaacctgacgacgatccttgtgacacacagcatggaggatgcagctgcatacgctgatgaaatgattgttatgcataaaggaacgatacaagcatcaggcagtccgcgtgatctgtttttaaagggtgaagagatggccggctgggggctggatcttccagaaacaataaaattccaaagacaccttgaagctgcactgggtgtgagatttaatgagcctatgctcacaatcgaagatgccgctgctgaaatccgtgctctttttcagggagagaagactttatgatggacagcatgattatcggcaagtatgtaccgggtacttcacttgtgcaccggcttgaccccagaacaaaactgatcacgatctttttatttgtctgcatcgtattcttagccaataatgttcagacatatacgttgcttggtttatttacaattggcgtcgtttctttaacaagagttcctttctcttttttaatgaaagggctgaagccaatcatctggattgttctttttacgttccttcttcacatccttatgacacatgaaggaccgattatctttcaaataggttttttcaaagtctatgagggcggtctggttcaggggatattcatttctcttagattcgtctatttgattttaatcacaaccttattaacgcttacgactacaccgattgagattaccgatggaatggaacagctgctgaacccattgaaaaaattaaagcttcctgttcatgagctggctcttatgatgtcaatttctttacggtttattccgacactgatggaggagacagataagatcatgaaggctcagatggcgcgaggcgttgattttacaagcgggcctgtcaaagatagagtgaaggctattgtcccgcttcttgtcccgctcttcgtcagcgcatttaaacgcgccgaagagcttgcggtggcaatggaagcaagaggctatcaaggcggagaaggacgtacgaaatatagaaagcttgtatggacaggaaaagacacttctgtcattgtcagcttaattgtattagctgctttgttatttttcttaagggcttagaggtgctgtatgagactgaaatgcacgatttcttatgacggacatttgtttaacggttatcaggttcagccgggcaaaagaacggttcaggatgaactggagaaggctttggctgtcctgcataagtcaaaagacagaattccggtcgtttcgtctggaagaacagacagcggggttcacgcagccggacaggtgattcattttgacactccactgtctatcccggctgagagatggccatatgccttaaatgcactgcttccggacgatatcgcagtcaaacaggcagaaattgcggatgatgggttccatgcacgatttagcgcagtcaaaaaagaatatcgctactttgtatacacggagaaacacccggacgtatttaaacggcattacgcttaccatttttcatatcgccttaatgtgcaggacataagagaagcggcaaagcatcttatagggacacatgattttacgagcttttgcgcggctaaaacagaagtgcaggacaaggtaagaacgatatacgaacttgattggactgagacggctgacggcctgcaaatgcggatcacaggcagcggtttcttatataatatggtcagaattattgcgggtactttgcttgatgcaggtattggaaaaatttctcccgatgaggtgaaatccatgctggaagcgaaggatcgcgaagcggcagggcgcacagcgccggggcacgggctatatttatggaacgtttactatgacaactaaaccaggtgtataatattttcttgacagagtctgcataaagttataagatatcatatggtatgtatttcaaccccacgataagccccggaacttattgtgttgtgaaatagaacgtaatcgaagtttattgaaaatgacagatcatttaggagggaaattcaatgcgtacaacacctatggctaacgcaagtactattgaacgcaagtggttagttgttgatgctgctggcaagactttaggtcgtctttcttcagaagttgcagctatccttcgcggaaaacacaaaccaacttacacaccacacgttgatactggagatcatgtgatcatcatcaacgctgaaaaaatcgagttaactggtaaaaagttaactgacaaaatctactaccgtcacactcaacatccaggcggattaaaatcaagaactgctcttgaaatgcgtacaaactaccctgagaaaatgcttgagcttgctatcaaaggcatgcttccaaaaggttctctaggtcgtcaaatgttcaaaaaattgaacgtataccgtggttctgagcatccacacgaagcacaaaaacctgaagtttacgaacttcgcggttaattaaaaaggaggttaccaatttggcacaggttcaatattacggtactggccgtcgtaaaagctctgtagcgcgtgtgcgtttagttccaggagaaggccgtatcgtcgttaataatcgtgaaatcagcgaacatatcccatctgcagctttaatcgaagatatcaaacaaccattaactttgactgaaacagctggcacttatgatgttttagtaaacgtacatggaggcggcttatctggtcaagctggagcaatccgtcacggtatcgctcgtgctttgcttgaagcagatccagaataccgtacaactcttaaacgtgcaggtcttctgactcgtgacgctcgtatgaaagaacgtaaaaaatacggtcttaaaggcgctcgtcgtgcacctcagttctcaaaacgttaattttacgttttcaaaaagctctcgaccttgggttgggagcttttttcttttaatataacgtggccagctccgcataaaaataacactgaatggacgcttgacggggttaaacaaattgtttgtttataaacggtctcactgtaaaaatcatgatatctttcatttttattcaattggaagttcggtcaatgtttattatcgttatgtgatcagaccagcttcatctaaccactgtatctcatccgttaaagttcactgctgattaactcggagaaacaatagctctcattgctaatggctttatgtaacgaagtaaaagtaaatctgatgatataaatcacatatctcctttgtgatttttttgcgtttttatgaacttttttctaaatatgcaaagggaaagcgatatcaatctagaaatatttgttatactctatacattaaagtaaggagaagattcatgaatgcgttagtagctcataatagcaaagcctgggataaaaaagtagaaacaggcaatgaatggactgttgctgctgagcagcaggttatcgaacaagcaaaaaaaggtaattgggatataagggtaacgccaatgaaagatgtaccgaaggattggtttccgcctatcaaaggtctgaaagtactctgtttagcctcaggcggtggccagcagggtccagttttggcagccgcaggtgcggatgtcaccgtattagataactcagaaaaacagttgaatcaggatagaatggttgctgagcgagatggtctcacgatacacactgtcaaaggaagcatggacgatttaagtgtatttaatgatgaatcatttgatgtcattgtacatcctgttgccaatgtttttgttgagaatgtcctcccggtatggaaggaagcgcaccgtgtgttgaaaaggaacggtgttctaatctcgggttttgtcaatcctgttgtatttctgtttgatacagaattagaacagcaaggtgttttaaaagtaaaacactccattccatatgctgacccagaagatcttccgaaacatagagtgaaaaaactgatcgaaaataatgaggctctggaattcggccattccttagaagaccaaatcaaaggccaaattgatgctggttttatcgttactggtttttatgaagataaaggtgggtttgtattagaccaatatatccatacatattctgcaacaagaagcgtgaaagtatgaaaagcagcgacctgttagaggggctgctttttttataactaattacagaacattcgttcctgaccctgcagaaagttgattttttatcgattttacaccttcatttgggcgaatttccaaccgaattcgggcattgtttcattatccaaacctcaaaataatcgataaaaggagagtgaatttatatggcagaagtactgtcttttatggatgtgaaacgccaaaaggattttgaattagaaaagaacttgctcaaagaactctctctgagacaaattatccagtctgttaaggattgtttggaaccattgtttccatttttacatgatgaacgagatattattactgaaggctgtattgattttgcgattgaagcttatttgttaggcgggcgttttgggatattcggctattacggagaatccatgcaaagtatcagtgcccgctctgcaagagaagaagaagagctacgtatggagttttttgattatctctataattggatacacgagcaatacgcaacatttgataaaaacacggtttatgaagcggcacgcaagttcattaaagattggtggacagcagggtttgttcaaagagaaaaacagtgtaagcttcgcatgcggtaatcatatttcccggccctgtcccatagttatgtaataacggacaagcgggaggggaagggatgaggaaaaagcttaaatggctcagttttttgctaggcttcatcatattactatttctgttcaagtatcagttcagcaataacgactcttggaagccgtggagcctgcccttgagcggtaaaatcatttatctagatccaggtcatggcgggcctgacggcggagcagtcggcggaaagctgttagagaaggatgttaccctggaagtggcctttagagtcagggattatcttcaagaacaaggagcgcttgttatcatgaccagagaaagtgatactgatctcgctccagaaggaacaaaaggctatagccgacgaaaagctgaggatctaagacaacgagtcaaattaataaaccattcagaggcggagctctatatcagcattcatcttaatgcgattccgtcacaaaaatggagcggcgcccaaagcttttattacgggaaatatgcggaaaatgagaaagtcgcaaaatacattcaggatgagctgagaagaaatctggaaaacacaacccggaaagcaaagcggattcatggtatctacttaatgcaaaacgtcaccaaaccgggggcgcttatagaagtcgggtttttatccaatccaagtgaagcaacgttgctcggtaaaccgaaatatcaagacaaggtggcatcttccatatataaaggcattttgcgatatttcacagaaaaaggagaccctccggagtaatggagggttttcttgtggttctaagcataagacacccgccatttatgtatgatataataataattgtaaacgaatacacaaaagggtgaggttcgatgataagagaagatgaagtaagaaaactagtcggagaaatgcgcgaaccttttcttcaaagacctctgggagaattggatgccgttaaggaaattaaaataaagcctgaaaaacggcatatcagtgtaaaagtcgctcttgcaaaaacaggaactgcagaacaaatgcagattcagcaagagatcgtaaacgtattaaaaggggcaggagctgagacagtcggccttcgatttgaagagctgcctgaagaaacggttgctaaattccgggcgccgtcagctgagaaaaaaacattattaaatatggataacccgccagtctttcttgccgtagcaagtggaaaaggcggcgtaggcaagtcaactgtgtccgtaaacctagctatttctctggctcgtctagggaaaaaggttggtttaattgatgcggatatttatgggttcagtgtgccggacatgatgggtatcactgtgcgtccaacgattgaaggagagaaacttcttcctgttgaacgctttggagtaaaggtcatgtcaatgggctttttcgtagaagaaaatgctccggtcgtatggagaggaccgatgctcggcaaaatgctgaataactttttccatgaagtagagtggggagaagtagactatatcgttcttgatcttccgcctggtacaggggatgttgctctcgatgtacatacaatgcttccgagctgcaaagaaatcatcgtatctacgccgcatccgacagctgcttttgtcgcggccagagcgggctctatggcgattaaaaccgatcatgaggtcgtgggggtcatagagaacatggcttattatgaaagtgcaaagacaggggaaagagaatatgtctttggaaaaggcggaggagataaactggctgaggaactaaatgtgcctttgctcggcagaatcccattgaaacagccagattgggataaggaccaatttgctccgtctgtttacgacgagaatcatccaatcggagaaatatatcaggacatcgcaaaaaaaatagatgcaaaaatgtctgtgcaggtataaaaggtgaaccgggattccagatcccggctttccctttattcactttctttggctgtgtcttttgctgcttttttcagctcatcttcgaactgctttttgtaaagcggactagaaagtgtttcgttaataacctcttctaaataactgcggaattcttggctttttgccagctggctgtactttttatccatgccgggatcctgcataacgctcatcagcatcttctggtaatctggatccttcatcagctttttaatcactttttcatgctctgtctgaagagttttggcaaagccctcagcaaaatcagtgtcttcaaagatgtttttccaaaattcttcaccttttttagatgtgagtgttttttctattgttcctttaattgcatcttggtcaatcaccagcgcttcattcatggcatcatcatttaataattccttaatagctttctttccatcatcagtttttaatatatcaacaaccatttttttggtctgatcatagtccatatccgctgcttggtcttttggagcgcaagctgttacagataataacaaaaaacagctcatcaatagcgttttggcttttgacatgcttaagctcctttcacatacttgtcttacctttaatatgattcatctgtttggaattatacataacaaaatatcgctgttcgcgatttttgaggggatgaataaagaaatgaaaagccgtggtttagttcgttttttcttttctattttagctgtcggagcgcttatcacgagtattgtgggttttgctttaaaatggggagaatatagagggctgtttcttacatttgaagcggggcagattttctctgttttattttggtttatcggtgtaggcatgattttcagtgtgatcagccaaatgggttttttcgtgtttttaacagttcatcggtttgcgcttgagatattaaggtcctcctctttgtggaatttgctgcagttgtttttcatcctgtttgttgcttttgatttaatgtacgtgcgttttttattttttggagagagcggagaatcgctggctggctatgcgtggttaccggtgtttttattgatctttggagtgattacagcttatataaagcaaaagcagtcctctaagaaaacatttgtgtcatcgttgtttttgatggttgtgattaccgcattagaatggttccctgcattaagagtaaatgatgaggactggctttatttaatgctttttccgttaatggcatgtaatgccttccaattgctgatgctgccgaagtttgcagcaaagtaattactttacctctgcggatttggcatcagaatttgcgatgaggtcacccacggttacattttttaatcctttttctttcagctgatggatgatatcaggcaatgcttcttctgtttgttttgccgaatcggaggcatgtaaaagaataatgtctccaccggaaacttgcttggtcacattgtcgatgattttttcaactccgggatttgtccagtcttgagagttcacactgtaatgaacgactgtataattgtattgctttgcgacctttagaacattcttattgaattggccggtagggggtcttaatagctgtatgtctttgacccctaacttttcaaaggctgtttgcgcacggttcatgtccttttttatttcgctgctctctaaattggcatagtttttataagcgtagcccatgctcccgatttgatggccgtcctttacgatacgggccactgtgtcgggatggcgttctgcccaagaagctgaaagaaaaaacgttgcatttttaatcccgtttgctttcagagtattaagtatcggttctgctctctcatcgccccagctgatatcgaaagtaagtgaaatatctttagaatctgtttctcctttataaatggctttaggtccggtgtcagttgaaaacacgggaagcgggacagctctttggatataaaaaaagctggcagctgcaaatgcggcgataagtataataattaattgtttcacccgtttaatgtgccacacatagaagtgattcactgatgatgcctccttatcttgtccatcattcttgttttacatcttatgagcatggacaattgaatataaccgataaaatgtctcttcacatacagcctaaattgggtgttgaccttttgataatatccgtgatatattattattcgtcgctgataaacagctgacatcaactaaaagcttcattaagtactctgaaaaaagttgttgacttaaaagaagctaaatgttatagtaataaagctgcttcgttaagcggcggtaatgatctttgaaaactaaacaagacaaaacgtacctgttaattcagtttttagttttttgtttactcaagatcgagaaaatcaaacaaatacaaacaccgagggcttatacagcccatatactaatttcaagtttcgaaaagatctaaatagtgtatacaatatccgttttaaggggaggctaattgtacggaggtggagaagatggacgaaacagttaaacttaatcatacatgtgtgatttgtgatcaagagaagaatagaggcattcatctttatacgaaattcatatgcttagattgtgagagaaaagtaatttctacatcaacttctgatcctgactatgcgttttacgtaaaaaaactaaagagcattcatacaccgccattatattcatagacctgaaaaggtctttttttgtactcttaataataaaaagaagatgaaacttgtttaaggattgaacgtagtagataataatattaaaactgagtatagacacaggagtcgattatctcatgcagagattttttcactttttgatgtggagtttaactagcagtgcgacttttgttttcattggaatattgagcttttttggtttaaaccagtcgctttttttatctattgtttatgggcttgcttctggagcagccgtatatatagctggcatctggaatgcaagacggttatttcttaaaaagcatgaattgacaggaagagagtatgcttacattaagaaaaacttagaggaagcaaggcagaaaatggtccgtcttaggaaaaccttgtttcaggctaaaagcattcaaatgtttaagcaaaatgcagaaatgctaaggattgtgagaaggatttatctcctcaccaaaaaagagccaaagcggttttatcaggcagaacgatttttttatcaaactctcgattcggttgttgaattgacagagaagtatgcttttctatcatctcacccaaaaaaaagcaaagaactgtcgatgtcgttaagtgagacacgcatcactcttactgaattgaccaagcgtttagaggaagatttaactcaggcaatggatgatgaatttgacgagttgcagtttgaattagacgcagcaaaacattcattaaagaaataagggaagagggtaagagcgatgaaccgagaccaaagcgaccttcatatagatgaattattggcagatccttttggtggtaacatagagataccaggttcggaggctgtaaaagcagagaaagagcaagtacggcttgttgatgttcttcctgaggaaaacaaggaaaaagcaattcagcttgctggacagattgatcataaaaatatgcaaagcattgtcttatacggttcacaagctcaatctaaactgctgaacttttctcatgatatgattaatcatgttcaaaagaaggatgtcggggagattggcgaaatacttggagagctgatgaaaaagctggagcaagtaaatcctgatgatctccaatctaagaaaaagggtattttggcacgcatgtttggaagagtatcaagttctcttcaagaggtgctgtctaaataccaaaagaccagtgtgcagatagacagaatcagcttgaagctggagcactctaaaaatgctttaattagtgacaacaagctgttagagcagttatatgaaaaaaataaagaatattttgccgcgctgaatgtttatattgctgcaggagaactgaagctggaggaattaaaaacaaaaacgattcctgaactgaagcaacaggctgaatcgagtgatcataaccaaatggccgttcaagaggtgaatgatttaattcaatttgctgaccggttagataaaagggtgcatgatttgctgctgagcaggcaaattacaatccaaagtgcaccgcaaatcaggctgattcaaaacacaaaccaagcgttagcagaaaagattcagtcatccattgtgacagcgattccgctatggaaaaatcaagttgccattgcactgacgcttttaaggcagcgcaatgcagtggatgcacaacagaaagtatctgatacaaccaatgagcttttgctgaaaaatgcggagcttttaaaaaacaatacaattgaaactgcacgggcaaatgaaagaggccttgttgatatagataccttgaagaaggtgcaggaaagtttaataagcacgcttgaagaaacactgactatacaagaagaaggacgaatcaaacgccgtcaggcagaagaagagctcatgatgatggaaggcgacctgaagcaaaagctgattacaataaaggaaagatagttaccagtaagtctggctttaagttctgtcagaggcacgatataataaggtgtaagaagacacattcaaaggattgttttcatgaacacacctttatataaagcattaattcaacatgcgagaagaaattctcattcatttcatgttccgggacatcacaatggagatgtcttttttgatgacgctaagtcaatattcgatccgcttctcaccattgatgtaactgaactggcaggactggatgatctccatcatccttctggggtgattaaggaagctcaggagcttgccagtcaattatatggatcggcggaaagtttttttctggtaaatggtacgactgtcggaaacttagcgatgattttatctgtttgtgaacctggtgatacaattctggttcaaagaaactgtcataaatctgtatttcatgctgttgatttgtccggtgctgagccggtttatcttgcacctgacgttgattcagcgatgcatgtgcctacgcatgttccgcttggaacaattaaagaggccctggaagcatatccagatgcgaaaggcttggtacttaccaatccgacatattacggacatagtgctgatttgactgagatcattactgaagcccatcattacgggattcctgttttggtcgatgaagcgcatggcgcacattttattttaggtgagccttttccggtctcagctttaaaaatgggggcagatattgttgttcagtcggcccacaaaacgttgcctgccatgacgatgggttcttatttgcatctcaacagcagctgcaggattaacagggatcgggtggcagagtatttaaaccgattacaaagcagcagcccgtcttatccgattatggcttcgttagatattgcccgcgcttatgtacagcatattatagaagaacaaaagctttctgacattctgcagcggatacaaacacttaaacaaacgtttgattcacttacaaatgctgaagctgttaaccctgctaatccactgatcatcacggacccgctgaagctcacaattcgttcaaaacgcgggcattctggctatacgctgcaaagcatattagagcgtgccaacatattcactgagcttgctgatgaaaatcaagttctgctcgttctcccattgggaggaaaacggagaataaacggtgaaaccattagaagcatcgatgaagagattgagaaaacgcctccggatcagacgtttgtttctgcagaatggggtgtgcagcctgttactgtcttgccttatccaaaaaaggtcttacattcgtttaagaaagaatatgtgagctttgaggaagcagctggccggctgaatgcagaagatatcatcccttatcctccgggtatcccgatgattatggcgggagaaagaataacaaaagaaagtgtgcaaaagctcagccgcttgatcagcatgaaaacgcatgttcaagggaatatgaaaatcaaagagaaacaactacttgtttatatagaagaggagaaatcatgagcggtttatttattacattcgaaggtcctgaaggtgcaggaaaaacgactgttctgcaggagatcaaaaacatactgacagcagaaggccttcaggttatggcaactcgagagccaggcggaatagatattgcagaacaaattcgagaggttattctgaatgagaacaacacattaatggacccaaaaacagaagctctcttatatgcggctgcaaggcgccagcatttagttgaaaaagtaaaacctgctttagaacaggggtttatcgttctttgcgacagatttatagacagttctcttgcgtatcaaggatatgcaagaggacttggaattgatgaggttctgtcgattaatgaatttgccattggagatatgatgccccatgtaacggtttatttttcaattgatccggaagaaggactgaagcgtatttacgcaaacggctcacgggagaaaaacaggctcgatttagaaaaactggactttcatacaaaagtacaagaaggttatcaagagctgatgaagcgatttccggaaagatttcattcagttgatgccgggcaatccaaagacctcgtcgttcaggatgttctaaaggtgatcgatgaagcgttgaaaaaaattcaattgtgacctgtttcccaatagttgatataataatgtaaacgagatcacgttgtttccaatctaaaggaggccttcacagatgaaattgatagtggcagttgtacaagatcaggacagcaacagacttttgaaaaccttaacggatcacaacttcagagtcacaaagcttgcgacgacaggaggatttcttaaatcaggcaatacaacgtttatgatcggtgtcgaggatatacgcgtcaataaagcgttgagtctcattaaagaaaacgggcagaaacgtgatcagatgattgcccctgtatctccaatgggcggaaatgctgattcctatgtcccttatccagtcgaagttgaagttggcggagcgacagtatttgtccttccagtcgatgaatttcatcaattttaaggatctgaaactgtgaaaattaataaagatatacgtacatttatagataataagcagattccctctgtgaaaacatctgagatcacagcatcgtttaaaacatcaatggaaaaccaaagcagcaaaatgaagcttgatcagcttaccaggctgttatctgatatagaggcattcggaaaaaggctaacgaaatctcggaattttaaagacttagcgagatttaaaggacttgtgaaacgttttgtcaaagaagctgtggacagcggcctttcacatgaaacatcgaaaagctttgacctttatgggaacagcagaacgctgggacttgtgaaagaaatagatgacaaattgatacagcttacggaagagatgatggatcaggaaaaaccggcaattgatttgctggagcgtattggcgaaataaaaggtttattaattaacctttacacatagagagtgatacaatggcaatatcctggaaggaaatgaacgagcttcagcccagagtgatgaagcttttatataatagtattgagaaggacagactatcacacgcttatttgtttgaggggaaaaaaggaacaggcaagcttgatgccgcgctgcttcttgcaaaaagcttcttttgtctggaggatggcgcggagccttgtgagagctgccgaaactgtaaacggatagagtcagggaaccatcctgatctccatcttgttcagcctgatggcttatcaatcaaaaaggcgcaaattcaagcgctccaagaagagttttctaagacaggacttgaatcgcataaaaagctgtatattatttcgcacgcagatcaaatgacagcaaatgcggcgaacagcctgctgaaatttttagaagaaccgaacaaagacacaatggccgtcctcatcactgagcagccccaaaggttattggataccatcatttcaagatgccaaacccttccttttcagccttttcagccgaaagcaattgaagacagactgatcgaacaggacgtctcgcctcatatggcaaggcttctggccaacatgactaataatgtagcagaagcagtcgaattaagtcgaaatgatgagtttgcagagtctagagcgaaagtgataaaattgtatgaagtcctacaccagcggaaaggacatgcttttttctttattcaagatcaatggatgccctttttcaaagaaaaaacccatcaagaaatgggtcttgatatgctcttattgatatatcgtgatgtgttgtccatccaaataggaaatgaagataaattgatttatcaagacttattccaatcaataaaacagcatgcgctacaatcaacacaacaaagcgttacgaatcagatacttgctgttttagaagcaaagaaacggcttcattccaatgtgaatgtacaaggattaatggagcacttggtgttaatgttgcaggagggataagcttgtacaatgtaattggtgtccgctttaagaaagcgggtaaaatatattattttgatccgaatggatttcatatagaacatgacagctgcgtaattgtagaaactgtcagaggcgttgagtacggccaggtcgtaattgcaaataaacaggtggatgagcatgatgtggtgcttccccttcgaaaagtgatacgtgtagctgacgagcgcgatcttctcattgtagaagaaaataaacaggaagcactatcagcatttgatatctgccaaaagaaagtgattgagcatggcttggatatgaagctggtcgatgttgaattcacgtttgatcgcaataaagtcattttttacttcactgctgacggccgagtcgactttagagagcttgtaaaggatttggcttctatctttaagacaagaattgagctgcgccaaatcggagtgagggatgaggcaaaaatgctcggaggaatcggtccttgcggaagaatgctttgctgttcaacgtttcttggagattttgaacccgtttccattaaaatggccaaggatcagaacttgtctttaaatcctacgaagatttcgggcctttgcggacgattgatgtgctgtctaaaatatgagaacgatgagtatgagacggcaaaagaacagcttccggatataggagaaatgattacgacagcaaacggtcccgcgaaggtcgtcggactaaatattctggaacgggtgcttcaggtggaactgataaaccgtgaaaaagtgatagaatatacttgggaagagctcttggaagagggcgtcgtatccgcacaaaccacagattaacgaggtgtggaaccttggataaaaaagagttatttgatacagtcattaacttagaagaacaaattggttcactgtaccggcagctgggggatttgaagcagcatatcggtgagatgattgaggaaaatcatcatttacagcttgaaaacaagcatttgcgcaaacggctggacgatacgacgcagcagattgaaaagttcaaagctgataaaaaagaatcaaaaacacagaagacagagcaaactgatataggggaaggatatgataatctggcacgtctgtatcaagaaggatttcatatctgcaatgtccactatggaagtgttcgaaaagaggattgtcttttctgtctgtcattcttaaataaaaaatagggaaaaggcttccgcataagacgggagcctttttcaaaggtactgaaaggataagaagatggtttcattacatgatgatgaaagattagattatttgctggcagaggacatgaaaatcatacaaagcccaacagtgtttgctttttcgttggacgctgtgcttctgtccaaatttgcatacgttccgattcaaaaagggaaaatcgttgatttatgcaccggcaatggtattgtgccgctgctgctcagtacaagatcaaaagcagacattctgggagtcgaaatacaagaaaggctgcatgatatggctgttcgcagcgtggagtataataagctggatgatcagatccagatcatacatgatgacctgaaaaacatgccggagaaacttggacataatcgatatgatgttgtcacctgcaatccgccgtattttaaaacgccgaaacaaactgaacaaaacatgaacgagcatctccgaatcgcaagacatgaaatccactgcacattggaggatgtcatttcagtcagcagcaagctgctcaagcaagggggaaaagcagctcttgttcaccggccgggaaggcttctggagatttttgaactgatgaaggcttatcaaatcgagccaaaacgtgtacaatttgtctatccgaagcaagggaaagaagccaataccattttggttgaaggtattaaaggcgggcgtccggatttgaaaattcttcctcccttattcgtttatgatgaacaaaatgaatatacaaaagaaatcaggaccattttatatggagacaaataaccatttcttctacgtcgtgaaatgtaaggacaatagctggtatgccggatataccaacgatctgcataaacgagtgaaaacgcacaatgatggaaagggcgcaaagtacacaaaagtaagacgtccggttgaattaatttttgccgagagcttttcaacaaagcgggaagctatgcaggcggaatattatttcaaaaaactaactcgaaagaaaaaagagctttatatagaagaaaagcggaacaccaaggaggctgtatatgttaaggcgccaaatgagctttaatggaaagtcggacatgggaattctttacttggtcccaaccccaatcggaaatctagaggacatgacattccgggcgatcgacacgctgaaatcagtggatgcgattgctgcggaagatacgaggcaaacgaaaaagctttgtcatgtatatgaaattgaaacaccgctcgtcagctatcacgaacacaataaagaaagcagtgggcacaaaattattgaatggctgaaatcgggaaaaaacattgctcttgtcagtgatgccggtctgccgacgatttctgatcccggagcggaaattgtaaaggattttacggatataggcggttatgttgttccgttgccgggagcaaatgctgcattaacagctcttattgcttcaggtattgtaccgcagccttttttcttttacggttttctcaacagacagaaaaaagaaaagaagaaggagcttgaagcccttaaaaaacggcgggaaacgatcattttttatgaagcgcctcacagattgaaggaaaccttgtcagcgatggcagagatattaggagatcgggaaatcgctgtaacacgtgaactcactaagaaatatgaagagtttatccgaggaaccatatctgaggtcattggttgggcaaacgaggatcagatacgcggcgagttttgtcttgtcgtagaaggaagtaataatgaagaggtagatgaggaagaacaatggtgggaaaccctcactgcgaaagaacatgtcgagcattacatctcgaaaggcgctacgtctaaagaagccattaaaaaagcagcagtcgatcgcaatgtaccaaagcgtgaagtgtacgatgcttaccatattaagcaataaaaaaacgttcttgtgtcataacaagaacgttttttgtacaagaaatgattatttaaggttttgaagctggttttggatttcgctgatgatttgctcagcgccttctttactaagaaccaatttaccgcctgcaagtttaaggttatcatcagaaacttcaccagttacttggcaagtcatgtttggtttatattttttaaggatgattttttcatcatcaacatagatttcaagagcatctttttctgcgattccaagagtacgacgcagttcgataggaataactacacgtcctaattcatcaactttacgtacaataccagtagatttcataaacattctcctcccaagagatacttatttgtttaaattatatttttcttcgtcattattcgacaaaatccttaccttcatagcataacaaggtttccaataatcgtcaatcattttgtttactattgattgtaagaattagttcttatagtcagtaatgtcttagaaactaccgaaataacagcattttataaatatttaataaagctattatcctactaaaaatccttttaaatcaagactttcgaaccaaagttttttatttcatttgattatatacgacaaaattcgacacgaaaagactttttttattttcattaaagatttttaattttaattattctttttcagggcgtatgtatatattcttgatcttaaaggctaagatggtatcatagataaaggataaatataaataatattcatatatgatttgcacttatcgccgctctcgtcctttgggcgggagctttttgacattctgattaggaggtttcaagatgccgcaagaaaacaatacattttacattacaacaccgatttattatccgagcggaaaattacatatcggccatgcatatacgacagtcgcgggagatgcaatggcacgttacaaaagattaaaagggttcgatgttcgctatttaacgggaacggacgagcatggacaaaagatccagcaaaaagctgaacaggaaaacattacacctcaggagtatgtggatcgcgcagcggcagatattcaaaaactgtggaagcagcttgaaatctcaaacgacgactttatccgcacgacagaaaaacggcataaagttgtcattgaaaaggtgtttcaaaagcttcttgataacggggacatctatcttgatgagtatgaaggctggtacagcatccctgatgaaacgttctacacggaaactcagctcgttgatattgagcggaatgaaaagggagaggtcatcggcggaaaaagccctgacagcggtcacccagttgaattgatcaaagaggaatcttatttcttccgcatggggaaatacgcggatcgtcttctgaaatactatgaagaaaacccgacattcattcagccagaatcacgcaaaaacgaaatgattaataactttatcaaacctggacttgaggatttggcagtatcacgtaccacttttgattggggcgtgaaggtgccggaaaatccaaagcatgttgtatatgtttggattgacgcactatttaactatttaacggcactcggttatgatacagaaaatgatgagctttatcaaaaatattggcctgccgatgttcatttagtcggtaaggagattgtacgattccatactatttactggccaattatgctgatggcgctggatcttccgctgccaaagcaagtattcgcgcatggctggcttttgatgaaagacggaaaaatgtcgaaatcaaaaggaaacgttgtagatccggttacattaattgaacgctatggtttagacgagcttcgctattacctgcttcgcgaagtgccgttcggatctgacggtgtattcacgccggaaggatttgttgagcggattaattatgatttagcgaatgatttaggaaatctattgaatcgtactgttgcgatgattaacaagtattttgacggacaaatcggttcttacaaaggtgctgttacggaatttgaccaaacgctcacttccgttgctgaagaaacagtgaaagcttatgagaaagcaatggaaaatatggagttctcggtagcactttcgactttatggcagctcatcagccgcacaaacaaatacattgatgagacagctccatgggtgcttgcgaaagatccggcaaaagaagaagaattgcgatcagttatgtatcacctcgctgaatcattgcgtatttcagcggtactgcttcagccattcttaacaaaaacacctgaaaaaatgttcgagcagctgggcattactgatgaatctttaaaagcttgggacagcattacagctttcggccagctgaaagatacaaaagtacaaaaaggcgagccattgttccctcgtttagaggcagaagaagaaattgcttacatcaaagggaaaatgcaaggttcggcaccagcgaaagaagaaacaaaagaagaagagccgcaagaggtcgatcgtttacctgaaattacgattgatcaatttatggatgtagagcttcgcgtagctgaggtcattgaggcagaaccagtgaaaaaagcagaccgtttattgaagctgcagcttgatcttggttttgaaaagcgccaagtggtatccggcattgcgaagcattatacgcctgaagagcttgttggaaaaaaactcgtttgtgtaacaaatctaaaaccggttaaactcagaggagagctttctcaaggtatgatccttgcaggagaagcagacggcgttttaaaggtcgtatctatcgatcagtcgttaccaaaaggcacaagaattaaataatgataaacaaaaggtgtttcacgtgtaacaattcgtcgaacaccttttgtgtttcgacaagaaaggagtttttcacttatgttgtttgacactcacgcgcatttaaatgcagaacaatatgatactgatcttgaagaggttattgaacgggcaaaagctgaaaaagttgaacgaattgtcgtagttggttttgaccgtccgacgattacccgtgcgatggaaatgattgaggaatatgattttatttatgcagccattggctggcaccctgttgacgctattgacatgacagaggaagacttagcgtggattaaagagctttctgctcatgagaaagtggtagcgataggggaaatgggactggattatcattgggataaatcacctaaagatattcaaaaagaggtgtttagaaaacaaatcgccttagcgaaagaggtcaatttgcctattatcattcataaccgtgatgcaacggaggatgtcgtgaccattttgaaagaggaaggcgcagaagctgtgggcggaatcatgcactgctttacaggaagtgcggaagtggcaagagaatgcatgaaaatgaatttttatttatcatttgggggaccggtgacatttaaaaatgcgaagaaaccgaaggaagtagtgaaggaaattcccaatgaccggctgctgattgaaacggactgcccgtttctcacaccgcaccctttccgcgggaaaagaaatgagccaagctatgtgaaatatgtggcagaacaaatcgccgaattaaaagaaatgacctttgaagagattgcgtcaatcacgactgaaaatgcgaaaagacttttccgtataaactgacaaaaaacgctagcgggttttgtaagagcttgtcccttacagcgtttttctataaaagttctacatgctttcttctcctcataggataggtttgtcgacaagtctttcttccgtttctcagtgtatttcaggataatgaagaagacactgagcttttgggagaaagagaagggagggttgacagccttttagatactctatataatctctccgaggagaaggaggcgtttttcatcacacaaaaaatgaaaaagctgttttccgtaaagcttagcaaaagcaaagtcattctggttgctgcttgtttgcttttggcaggaagcgggactgcgtacgcggctcatgagctgacgaaacaatcagtctcagtttctatcaatggcaaaaagaaacatatacgcacacatgcaaatacagtcggtgatcttttggagacgcttgatataaagacaagagacgaagacaagatcacacctgctaaacagacaaagataacagcagacatggacgttgtgtatgaggctgcaaaacctgtgaagcttacaataaacggggaagaaaagacattatggtcaacagcaaaaacggtcggtgcattactggacgaacaagatgttgatgtgaaagaacaagatcaaattgatcccgcaatagatacagatatttcgaaagacatgaagattaacatagagcccgcatttcaggttactgtgaatgatgcagggaaacaaaagaagatctggacgacttcgactacggtcgctgactttttaaaacagcaaaagatgaacataaaagacgaagataaaatcaagcctgcgttagatgcaaagctgacgaaaggaaaggctgatattacaattactcgtatcgaaaaggtcaccgatgtagttgaagagaagattgcgttcgatgtgaaaaagcaagaagacgcttctcttgaaaaagggaaagaaaaggtcgtccaaaaaggaaaagaaggcaagctaaaaaaacatttcgaagtcgttaaagaaaacggtaaagaagtgtccagagagcttgtgaaagaagaaacagctgaacaaagcaaagataaagtgattgctgtcggcacaaagcaaagtagtccaaaagttgaaacggtcagtgcttcaggtgattcaaaaacagttgtgtcccgcagcaatgaatcaacaggcaaagtcatgactgtatcatctacggcttatacggcaagctgcagcggttgttcaggacatacagcgacaggcgtcaatttaaaaaataatccgaatgccaaagtcatcgctgtggatccaaatgtcattccgctaggctccaaagtccacgtggaaggctatggatatgctattgctgcagataccggttcagcgattaaagggaacaagatagacgtctttttcccagagaaatcatcggcgtaccgatggggaaataaaacagtcaaaattaaaatcttaaattagtatatacttatgtattcagagggttttgcgccctctgtttttttcgttataatagacaaagtgcattttctgcttattagacgctcgacataagaaaaagtttcatgaatatacaaaagtttttattttgtcttggaggaaataatgaaaattaaagagatcattgtggtcgaggggcgtgatgatacggcccgcatcaaattggctgttgatgcagacacaattgaaacaaatggttcagccatcgatgatcatgtgattgaccaaatccgtttggcccagaagaccagaggcgtcattgttttaacggatccggactttccgggagagaagattcgcaaaaccatctcagaggctgtgcccggctgtaagcatgcatttttgccaaaacatcttgccaaacctaaaaacaagcggggaattggtgtggagcatgcatcggttgaaagcattagggcatgtttagaaaatgtgcatgaggagatggaagcgcagccgagtgacatttcagctgaggatttgattcatgccggactaataggcggacctgcggccaaacgccgccgggaacgactgggtgatctgttgaaaatcggctatacaaatggcaaacagcttcaaaaacggctgcaaatgtttcaaattaaaaaaagtgattttatgagtgcgctcgataccgttatgcgggaggaacagaatgaataaagatattgcgacaccgattagaacgaaagagatactgaagaaatacggtttttcttttaaaaagagcttaggacagaatttcttaattgatacgaacattttaaacagaattgttgatcacgcggaagtgactgagaaaacaggtgtcattgaaatcggcccgggaatcggggctttaaccgaacagcttgccaagcgggcgaaaaaggtcgtggcatttgagattgatcagcgattattgccgattctgaaggatacactgtcaccttacgacaatgtcactgttattcatcatgacgtgttaaaggctgatgtcaaatcggtcattgaagaacaatttcaagattgcgatgagatcatggtagttgccaaccttccttattacgtaacaacaccgattatcatgaaactgcttgaagaacatcttccgctgaaagggattgtggtcatgctgcaaaaagaagtggctgagcgcatggcggctgatccttcatctaaggaatacggctcgctttcaatcgcggtgcagttttatacagaagccaaaacggtgatgatcgttccgaaaaccgtatttgttcctcagcctaatgtcgattccgcagtcatccgtctgattctccgagacggcccggcagtggacgtggaaaacgaatcctttttctttcagctcatcaaggcaagctttgcacagcgccgtaaaacgctgctcaataacttagttaacaatctgcctgaaggaaaagcgcaaaaatcaacgattgaacaagtgctcgaagaaacaaatattgacggtaagcgccgaggtgaatccctgtctattgaggagttcgcagcgctgtctaacggattgtataaagcccttttctaaaagggctttttgttttgcgcaccacatggactgccgctacataggctagagaaggacctttcattcaatgataagaaaaacttggactcagcgaaaaaaggcgctttctcaaggctctttctttcatgatgaggcttagtctatgtgtggagtgaggaacgtgcaatttcaaataggggatatggtagccagaaaatcctatcagatggatgttttgtttcgaattataggaatagagcaaacaagcaaaggaaattcaattgccattttgcatggagatgaagtcaggctgattgctgattcggatttttctgatctggtggcagtgaaaaaggatgagcagatgatgcggaaaaagaaagatgagagcagaatgaatgagtcgctcgaattactccgccaagattataagctgctcagagaaaagcaggagtactatgcgacaagccaatatcagcatcaggagcattatttccatatgccgggcaaagtgcttcatctggatggtgacgaagcatatctgaaaaaatgcctgaatgtctataaaaaaattggagtgccggtctatggcatccattgccatgaaaagaaaatgtctgcttctattgaagaattgctcgacaaatatcgacctgatatcctggtgatcacagggcatgatgcgtattcgaagcaaaagggcggcattgatgatttgaatgcgtacagacattctaagcactttgttgaaactgttcaaacagcccgaaaaaagatccctcacttagatcagcttgttatttttgcgggggcctgccaatcccattttgaatcactcatcagagcgggtgcgaattttgcaagttcaccgtcaagagtcaatattcatgcgcttgatccggtatatatcgtcgcgaagatcagctttacgccgtttatggaacggattaatgtatgggaagtgctccgtaatacgctgacaagagagaaagggcttggaggtattgaaacaagaggagttctgagaattggtatgccttataagtccaattaacagttgaaaacctgcataggagagctatgcgggttttttattttacataatgatacataatttaccgaaacttgcggaacataattgaggaatcatagaattttgtcaaaataattttattgacaacgtcttattaacgttgatataatttaaattttatttgacaaaaatgggctcgtgttgtacaataaatgtagtgaggtggatgcaatggcgaagacgttgtccgatattaaaagatcgcttgatgggaatttaggtaaaaggctgacgttaaaagcaaacggtggccgccgaaaaacgattgagcgttcgggcattttagctgagacgtacccttctgtttttgtgatacaactagatcaagacgagaactcgtttgaaagagtttcatacagttatgctgatattttgactgagactgttgagctgacatttaatgatgacgccgcaagctcagtggcattttaacgggcagtgaaccttttgtttactgctttttgttttgcccttttttggtttccaataattttaacgaaagttccatctgatttaacaaaagataaaacagtcacatattatcgtgacgtgcacgaatggctatcacttctaaaaaaggagttgtttcgtttgggcagacgtcgtggagttatgtcagatgagtttaaatatgagctggctaaagaccttggtttttatgacacagtaaaaaatggcggctggggcgaaattcgggctcgcgatgccggtaacatggtgaagcgtgctattgaaatcgccgaacagcaaatggctcagaatcagaataaccgataaggatgtgacctgggggacgtgctgttccctggtttttttattttggatataaatacataatgggctgaatatggatatgttcatcctgtacttcaaatgtgatacaatgttcatacttatgtttagatggagaagtaggtgaaagctatgcgtattttagaaaaagcgccagctaagatcaatctgtcacttgacgtcacccgaaaacgcccggatggctatcatgaagtcgaaatgatcatgacgacaattgatttagctgatcgaattgaattgacggagcttgcagaggatgaagtgagggtttcctcccacaaccgatttgtgcctgatgaccaaagaaacttagcttatcaggctgccaagctgatcaaggacagatacaacgtgaaaaagggagtttccatcatgattacgaaggtaattccggtggctgccggtcttgccggcggaagcagtgatgcggcggcgacactcagagggctgaacagactgtggaatttaaatctgtccgcggaaacgcttgctgagcttggagcggaaattggctctgacgtttcattttgtgtctatggcggaactgcattagcaacagggcgcggcgagaaaattaaacatataagcacgcctccgcactgctgggtcattttagcgaagccgacaatcggtgtttcaactgctgaagtgtacagagcgctgaaactggatggtatagagcatcccgatgtacaaggcatgatcgaggcgatagaagagaagagttttcagaagatgtgcagccggttaggcaatgtgcttgaatctgttacactcgacatgcatcctgaagttgcgatgattaaaaaccagatgaaacgctttggtgcagatgccgtgttaatgagcgggagcggcccgacagtatttggactggttcagtatgagtcgaaggtgcagagaatttataacgggttaagaggcttctgcgatcaagtttatgcggtgagaatgatcggcgaacagaacgctcttgattaaatccgtatgttaagttatattgatcttaaaatattcggattttgggggtaagttcatgaagtttcgtcgcagcggcagattggtggacttaacaaattatttgttaacccatccgcacgagttaataccgctaacctttttctctgagcggtatgaatctgcaaaatcatcgatcagtgaagatttaacaattattaaacaaacctttgaacagcaggggattggtactttgcttactgttcccggagctgccggaggcgttaaatatattccgaaaatgaagcaggctgaagctgaagagtttgtgcagacacttggacagtcgctggcaaatcctgagcgtatccttccgggcggttatgtatatttaacggatatcttaggaaagccatctgtactctccaaggtagggaagctgtttgcttccgtgtttgcagaacgcgaaattgatgttgtcatgaccgttgccacgaaaggcatccctcttgcgtatgcagctgcaagctatttgaatgtgcctgttgtgatcgttcgtaaagacaataaggtaacagagggctccacagtcagcattaattacgtttcaggctcctcaaaccgcattcaaacaatgtcacttgcgaaaagaagcatgaaaacgggttcaaacgtactcattattgatgactttatgaaagcaggcggcaccattaatggtatgattaacctgttggatgagtttaacgcaaatgtggcgggaatcggcgtcttagttgaagccgaaggagtagatgaacgtcttgttgacgaatatatgtcacttcttactctttcaaccatcaacatgaaagagaagtccattgaaattcagaatggcaattttctgcgtttttttaaagacaatcttttaaagaatggagagacagaatcatgacaaaagcagtccacacaaaacatgccccagcggcaatcgggccttattcacaagggattatcgtcaacaatatgttttacagctcaggtcaaatccctttgactccttcaggcgaaatggtgaacggcgatattaaggagcagactcatcaagtattcagcaatttaaaggcggttctggaagaagcgggtgcttcttttgaaacagttgtaaaagcaactgtatttatcgcggatatggaacagtttgcggaagtaaacgaagtgtacggacaatactttgacactcacaaaccggcgagatcttgtgttgaagtcgcgagactcccgaaggatgcgttagtcgagattgaagttattgcactggtgaaataataagaaaagtgattctgggagagcccgggatcacttttttatttaccttatgcccgaaatgaaagctttatgacctaattgtgtaactatatcctattttttcaaaaaatattttaaaaacgagcaggatttcagaaaaaatcgtggaattgatacactaatgcttttatatagggaaaaggtggtgaactactgtggaagttactgacgtaagattacgccgcgtgaataccgatggtcgcatgagagcgattgcatccatcacgctggatcacgaatttgttgtacatgatattcgtgtgattgatggaaacaatggtcttttcgttgcgatgccgagtaaacgcacccctgatggagagttccgcgatattgctcatcctattaattcaagcacgcgaggaaagattcaagatgccgtgttaaatgagtatcatcgtctgggtgacactgaagcattagaattcgaagaagctggagcttcttaaaaaataaccaaaaagcaaggactgctgaaagggctgacataagccttttgccggcggtccttttttaattctgatttttcaaacttagttgcactcaatagaaaattcttgcacttcatgaagtctccttgaaatcagaagatatttaggatatatttttctatggataaaagggatattggaggccaataaatggataagcggtttgcagttgttttagcggctggacaaggaacgagaatgaaatcgaagctttataaagtccttcatccagtttgcggtaagcctatggtagagcacgtcgtggacgaagccttaaaattatctttatcaaagcttgtcacgattgtcggacatggtgcggaagaagtgaaaaagcagcttggtgataaaagcgagtacgcgcttcaagcagaacagcttggcactgctcatgctgtaaaacaggcacagccatttcttgctgacgaaaaaggcgtcacaattgtcatttgcggagatacgccgcttttgacagcagagacgatggaacagatgctgaaagaacatacacaaagagaagcgaaagctacgattttaactgcggttgcagaagatccaaccggatacggccgcattattcgcagcgaaaacggagcggttcaaaaaatcgttgagcataaggacgcctctgaagaagaacgtcttgtaactgagatcaacaccggtacgtattgttttgacaatgaagcgttatttcgggctattgatctggtgtctaatgataatgcccaaggcgagtattatttgccggatgtcatagagattcttaaaaatgaaggcgaaactgttgccgcttaccagactggtaatttccaagaaacgctcggagttaatgatagagttgctctttctcaggcagaacaatttatgaaagagcgcattaataaacggcatatgcaaaatggcgtgacgttgatcgacccgatgaatacgtatatttctcctgacgctgttatcggaagcgatactgtgatttaccctggaactgtgattaaaggtgaggtgcaaatcggagaagatacgattattggccctcatacggagattatgaatagtgccattggcagccgtacggttattaaacaatcggtagtcaatcacagtaaagtggggaatgatgtaaacataggaccttttgctcacatcagacctgattctgtcatcgggaatgaagtgaagatcgggaattttgtagaaattaaaaagactcaattcggagaccgaagcaaggcatctcatctaagctatgtcggcgatgctgaggtaggcactgatgtaaacctgggctgcggttcaattactgtcaattatgatggaaagaataagtatttgacaaaaattgaagatggcgcatttatcggctgcaattccaacttggttgcccctgtcacagtcggagaaggcgcttatgtggcggcaggttcaactgttacggaagatgtacctggaaaagcacttgctattgccagagcgagacaagtaaataaagacgattatgtgaaaaatattcataaaaaataatcctaaattcggaggtttatccatgtctaatcaatacggagataagaatttaaagattttttctttgaattcgaatccagagcttgcaaaagaaatcgcagatatagttggagttcaattagggaaatgttctgtcacaagatttagtgacggggaagtccaaattaatatcgaagaaagtattcgcggatgtgattgttacatcatccagtctacaagtgaccccgttaacgagcatattatggaactgctgattatggtagatgcgttaaaacgcgcttctgcaaaaacgattaacattgttattccttattacggttatgcgcgtcaagacagaaaagcaagatcccgtgagccaatcacagctaaacttttcgctaacctgcttgaaacagccggtgcgactcgtgtgattgcacttgacctgcatgcgccgcaaattcaaggattctttgatataccgattgaccacttaatgggtgttccgattttaggagaatattttgaaggcaaaaatcttgaagatatcgtcattgtttcaccagaccatggcggtgtgacacgtgcccgcaaactggctgaccgactaaaagcgccaattgcgattatcgataaacgccgtccgcgtccaaacgtggcggaagtcatgaatattgtaggtaacatcgaagggaagactgctatcctcatcgatgacattattgatactgcaggtacgattacacttgctgctaatgcgctcgttgaaaacggagcgaaagaagtatatgcatgctgtacacaccctgtactatcaggccctgcggtagaacggattaataattcaacaattaaagagcttgttgtgacaaacagcatcaagcttcctgaagaaaagaaaattgaacgctttaagcagctttcagtcggaccgcttctggcagaagcgattattcgcgttcatgagcagcaatcagtcagctatctgttcagctaaaccatttttcgaggtttaaatccttatcgttatgggtattgtttgtaataggacaactaaaacgacaataggatggtgctgaatatggcaactttaacggcaaaagaaagaacggactttactcgttcgtctcttcggaatatccgtacttcaggacatgttccaggtatcatatatgggaaggatacgggtaacaaacctgtgtcattagacagtgtggagctcatcaaaacgctgagggacgaaggcaaaaatgcagtcattacgcttgaggtcagcggagaaaaacactcagtcatggtaacagacctgcagacggacccgctgaaaaatgaaatcactcatgctgattttcaagtagttaatatgagtgaggacattgaagtggaagttccgattcatctgaccggagaagccattggagtgaaaaacggaggcgtactgcagcagccgttatatgcacttactgtaaaggccaagccaaaagccattccgcaaacgattgaggctgatatttcaagcctcgatgtaaatgaagtactgacgattgcggatttgcctgctggcggtgactactcctttaatcatgaatcagatgaggttgtggcttcaatccttcctccgcagcagcaggaagcagctgaggtcgatgaagaggaatctgccgatgctcagccagaaggtgaaaacgaacaataatagcttaaggcgtaaccctcccgcggttacgtcttttgtgctagaatgagaagaattatagcccgattatgaagacgggagttatgtgactaagggaggattcgccatgcttgtgattgccggtctcggaaacccggggaagaactatgaaaatacacggcataatgtcggatttatggtgatagatcagcttgcaaaggaatggaatatagagctgaatcaaaataaatttaacggattatacggaaccggatttgtttccggcaaaaaggttctacttgttaaaccgcttacatatatgaatttatcaggagaatgtttgcggcctttaatggactactatgatgtcgataacgaagatttgacagtcatttacgacgaccttgaccttccgactggcaagatccgtttaagaacgaaaggaagcgccggagggcacaatggcatcaaatcactgatccagcatcttggaacatccgagtttgaccgtatccgcatcggaatcggccggcctgtaaacggcatgaaggtcgttgattatgtgttaggctcctttaccaaggaggaggcacctgagatcgaagaagcggttgataaatctgtgaaggcttgtgaggcttctttgagtaaaccgtttttagaagtcatgaacgaatttaacgcaaaggtataaaatgtaacaacaaagtccatactacaccaaaatgactttttcatcaggaggtcccttgtatggctttgcattattattgtcgtcattgcggagtgaaagtaggcagtctcgaatcttcaatggtatcgacagactcacttggatttcagcacttaacaaatgaggaaagaaacgatatgatttcttataaagaaaatggagatgtccatgttttgacgatatgtgaagattgccaagaggcgcttgaccgaaatccgcattaccacgaatatcacacatttattcaataaaaagctttggtgtagacactagaccaaagcgtttttctgttctcgcaggaaacagagaggaggggccatatggacaacattcaaacctttataaaagaaagcgatgactttaaatccatcatcaacggtttacacgagggcctgaaggaacagctgctcgcgggtctgtcgggttccgcgcgttctgtttttacttctgctctggctaatgaaacgaataagcctatctttctcatcacccataacttatatcaagcccagaaagtaacagatgatctgacttcacttctagaggatcggtctgtccttttgtaccccgtcaatgaactcatttcatcagaaatcgcagttgcaagccctgaattgcgggcgcagcgattagatgtcattaatagactaacgaatggagaagcgccaattgtcgttgctccggtagcggcaatcagaagaatgctgccgcctgttgaggtgtggaaaagcagccagatgctcattcaagtaggccatgatatcgaacctgaccagcttgcctcacggctgatagaggtagggtatgagcggtctgatatggtttctgcgcccggggaattcagtattcgcgggggaatcatagacatttatccgttgacttcagagaatccggtgagaattgaactttttgacaccgaggtggattcaatccgcagctttaattcagatgatcagcggtcaattgagacccttacctcgatcaatatcggtcccgcgaaggaattaattatcagaccggaagaaaaagcgcgggcgatggagaaaatcgatagtggtcttgccgcgagcttgaaaaaattaaaggctgacaaacaaaaagaaatacttcatgcgaatatttctcacgataaggaacgcttgtctgaaggccagacagatcaggagctcgtgaagtatctctcatatttctatgaaaagcctgctagtttactagattatacacctgataatacacttctgattttggatgaagtcagtcggattcatgagatggaagaacagcttcaaaaagaagaagcggagtttatcacaaatcttcttgaggaagggaagattttgcatgacattcgtttgtcattcagcttccaaaaaatagtggctgagcaaaaacggcctctgctgtactactctttatttttgcggcatgtacaccatacgagcccgcaaaatatcgtcaatgtgtcaggccggcaaatgcagagtttccatggccaaatgaacgtgcttgcgggcgaaatggagcgttttaaaaaatcaaatttcactgttgtgttcttaggagcaaacaaggaacgtacacagaaattgtcatctgttttggctgattatgatatcgaggccgccgtgacagacagcaaaaaagcgcttgttcagggacaggtctatatcatggaaggcgagctccaatcgggatttgagctgccgttaatgaagcttgccgttatcacggaagaagaactgttcaaaaaccgtgtaaagaagaagccgcgaaaacagaagcttaccaatgcagagcgcatcaaaagctattctgagcttcaaattggagattatgtcgttcatattaatcacgggatcggaaagtacctggggattgaaactcttgaaatcaacggcattcataaagactatttaaatatacattatcagggcagtgacaagctttacgtccctgtagaacaaattgatcaggtccaaaaatatgtcggctccgaaggaaaagagccaaagctgtataaattaggcggaagtgaatggaagcgggtcaagaaaaaagtagagacatccgttcaggatatagctgacgacttaattaagctgtatgccgaaagagaagcgagcaagggctatgcgttttctcctgaccatgagatgcagcgtgaattcgaatcggctttcccttatcaagagactgatgatcagctccgttcgattcacgaaatcaaaaaagacatggaaagagaacgtccgatggaccgcttgctgtgcggagatgtgggctacggtaaaacagaggttgccatacgtgccgcgtttaaggcgatcggtgacggaaagcaggtagctctgctcgttccgacaacaattttggcacagcagcattatgaaaccataaaagagcgcttccaggactatccgattaatatcggacttctcagcaggttcagaacgagaaaagaagcaaacgaaacaatcaaagggctgaaaaacggaacagttgatatcgtcatcgggacgcatcggctgctatcaaaggatgtcgtgtataaagatttaggactcctcatcattgatgaagagcagcgtttcggtgtaacccataaagaaaagatcaagcaaataaaagccaatgttgatgtattaacgttaacagcaacacctattccgcgtacgctgcatatgtctatgcttggcgtaagggacctttcagtcatcgagactccgccggaaaatcgcttccccgtacagacgtatgttgtggaatataacggcgctcttgtcagagaggcgattgaacgtgagcttgcacgcggaggccaggtctatttcttgtacaaccgggtagaggacattgagcggaaagctgatgaaatttcaatgctagtccctgacgcgaaggtagcatatgcgcatgggaaaatgacagaaaatgaattagaaaccgttatgctaagtttccttgaaggagaatcagacgttctcgtcagcacaaccattatcgaaactggcgtggacatcccgaacgtcaatacgctgatcgtatttgacgccgacaagatgggactttctcagctttaccagctgcgggggcgtgtcggtcgttctaaccgtgtggcgtatgcgtacttcacgtatcgccgggataaagtgctgacagaagtggctgaaaaaaggctgcaggccattaaagaattcacagagctaggttccggttttaaaatcgcaatgcgtgacttaacgattcgcggagccgggaatcttcttggtgcccagcagcatggcttcatcgattcggtcggatttgacctctattcacaaatgctgaaggaggccattgaggagcgtaaaggagacacagcgaagacagagcagtttgaaacagaaattgatgtcgagcttgatgcgtatattccggaaacttatattcaagacggcaaacagaaaattgatatgtataaacgcttcaggtctgtggcgacaatcgaagagaagaatgagcttcaagatgaaatgatcgaccgctttggaaactatccaaaagaagtcgaatacttgtttactgttgcagaaatgaaagtctatgcgagacaggaacgtgtcgagctgattaagcaggataaagatgctgtcagattgacgatttctgaagaagcaagtgctgaaattgacggacagaagctgtttgagcttggcaatcaatatggcagacaaatcggactgggaatggaagggaaaaaactcaaaatctccatacagacgaaaggccgtagtgccgatgaatggctcgacaccgtgctgggcatgctgaagggcttaaaagatgtgaaaaagcaaaccatttcatcaacgtaaattttgttactctctggtgtatattacatttgatgtgacggatactaatttcaagcgaggcggaaggtacataaagtaactgctttaggtctttcccacatgtatataccatcaaatgaaagagaggcaccagagatgaaagcaaccggtatcgtacgtcgtattgatgacttaggtcgggtcgtgattcctaaagaaattcgaagaactctgagaatcagggaaggcgatccgcttgagatttttgtagatcgtgacggagaagtgattttgaaaaagtactctccgatcagtgagcttggagactttgcaaaggagtatgcagacgcgctttacgacagcctcggccattcagtgctgatttgtgatcgtgatgtatatattgccgtgtccggcagctccaaaaaagattacttaaacaagtcaatcagcgaaatgctggaaagaacaatggatcagcgcagctccgtgcttgagagtgatgcgaaatcagtacagcttgtgaatggaattgatgaggacatgaattcttatactgtcggcccaattgtggcgaacggtgatccgataggtgctgtggtgattttttcaaaagatcagacaatgggcgaagtagagcataaagccgttgaaacagcagctggatttttggctcgtcaaatggaacagtaggtcttattcctttcttcgaaaataggtatgtaaagaacagctctccttgggacgctgttctttttcatgcgtgccgaaaaaggaatccaagggttgggatgtggtataataacctcgtttttatttgtgccgcggtaatacgtgaaccgtattgcccctgacgttgggaaggagcttttggatggacgattcaataggcgttaaacggcattggatttggcagggggcttttgttttaattctggcaggcgtcatcacaaaaattttaagcgccgtttacagagtcccgtttcaaaacattgtcggcgatgttggattttatatatatcagcaggtatacccctttcttggtattgcggtcatgctgtccacatcaggatttccagtcattatttcaaagctgatgaatgattatagtgaaaaaaatcatcacactatattaaaaatatcagtgttatttttatctttaatcggtattttattatttctttgtttatatctgggtgctgttcctattgcgctctttatgggggattcgcatttagccgtgttaattcaagtgaccgcgtacgcgtttctgctgttcccgtttgttgcgttgcttagaggcagttttcaagggcgtcacgaaatgctcccttcagccttatcacagatgacagagcagtttctgcgtgttgcggtgctattgggtttatcattttggctcgtgaaaaagggagcctcgctttatactgcgggagcggcagccgcttcaggctctcttgccggaagtttggttgcgttgatgatactggggtttttttggttcaaaacgaaaagagacaaccaaacggataggcaaaacgaaaatgtcatcacaacaaaagaattgacgaaaaaactgcttttatattcgattacaatttgtgtaagcagtttgctgcttttgtttatccagcttgttgatgctttgaatttatatgctttgctttcgggtggtgaggcaagcgaagaagcgaaacgcctaaaggggatctatgatcggggacaaccgttgctgcagctcggttcaattttcgcggtgagcattgcgacgtcactcgttccgtatatttctatggccgtaaaaaacaatgagctgaagatcatgaaagaaaaaatcacgtcatctttgaaactatgccttgtgctcggtacaggcgcatcggctgggttgatttgcattcttaagccggttaatatcatgctgtttcaaaatggagaagggacaggtgcgttacaagtatttagctgctccattttgtttgcatccttgggggtaacggcagcggcagtcttacagggagcggggtacacagtttttcctgcgatagcggtgggagcgggtgttgcagtgaaatgggtgctaaacacacttttggttccgcgctatgggattgaaggcgcatcgcttgcgacagcggcttcctttgcggctgtcgccggcctcaacttgtatcagcttcggcaaaaggaatggctcgataagcttagaggcgttttgattccgattattggatctgctcttttgatgtcagctgttttgcttgcgtatacgcgtctatggactttcttgtttcctgcaacaggaagaggagttgctgtgattgagagtctttctgctgttgcaattggtggcgcggtgtttatttattgtatgatgagattgggaatatttacagatgaagagctgaacagtgtgccattcggcagcaagttaagcaaattcatgagaaggagagaacaaaatggcgggtaaaattacagtcgtgggacttggtgccggagacatggaccagttgacaattggtatacacaagctgttgacgaaggcagatacgctgtatgtcagaaccaaggatcatcctttaattgaggagcttgaaaaagaaacgaagaacatccgtttctttgatgatatatatgagaaacatgatcagttcgaggcggtatatgaagaaattgctgatatcctctttgaagcggcgcggcgtgaggacgtggtttatgctgtgccgggacacccttttgtcgcagaaaaaacagttcagctgctgacggagcggcaggaaaaggaaaacgttcaagtgaaagccgcgggtggacaaagtttccttgatgccacattcaatgccttgcaaattgacccgattgaaggttttcaatttgtggatgccggcacattgtctgcggatgagcttgagctcagacatcatctgatcatatgtcaggtttacgaccaaatgacggcttctgaagtcaagctgacattgatggagaagctgcctgatgattatgaggtcgtcattgtgactgcagcaggcagccgtggcgaggagatcaagacagtgccattatttgagctggaccgcaatgtcgccttgaacaacttaacaagtgtgtatattccgccgattaaagaagagaagctgctttatcacgaattctccacgttccgaagcatcatcagagagcttcgcggacctaatggatgtccgtgggataaaaagcagacgcatcagtcattaaaacagtacatgattgaagaatgttatgagcttctcgaagctattgacgaagaagacacagaccatatgatcgaagagcttggcgacgttttgcttcaggtcttgcttcacgcgcaaattggtgaagatgaaggttatttcacaattgatgatgtcataaaaggaatcagtgaaaaaatggtccgaagacatccccatgtgtttaaagatgttaaggttcaggatgaaaacgatgttttggccaattgggaagatataaaaaaggccgaaaaaaatacatctgaatcatcgttactagacagcgtaccgaaaacccttccggctctttcgaaagctgctaaattgcagaaaaaagcagcgaaggtcggttttgactgggaagacgtcagcgatatttgggaaaaggtaagtgaggaaatgaaggaattttcttctgaggtttctgaagctcctcacgaccacaatcttaaagctgagtttggcgacattttgttcgcgctggtgaatgtagcccgcttctacaaaatagagccagaggaagcgctgaccatgactaatgacaaattccggagacgcttctcgtacattgaggaaacagcgaaggaaaagggagtcgagttggctgatatgtcccttgaggacatggacaaactgtggaatgaagcaaaagaaactgagaggagatcatagatatgagattagataaatttttgaaagtatcacggctgatcaaacggcgtacactagcgaaggaagtagctgaccaaggacgaatctctattaacggaaaccaagctaaagcaagctctgacgtaaaaccgggagatgaactaacggtccgcttcggccaaaagcttgtaacggttcaagttaatgaattgaaagacacgacgaaaaaagaagaagctgcaaacatgtacacgattctaaaagaagaaaaactcggcgaataggcttgttctaaaaaaatcccctacctcatacaatgcagtaataatgctaaaagtatcgaggatatgggggctgaatagatgaattcatattatgatcaaaaaggttcttcgtctgttccggaacaacatgatgtgacaatgaaaggccggaagcatttagatatttctggggttaagcatgtggagagttttgataacgaagaattcctgctggaaacggtgatgggaatgctctccgtcagaggccaaaacctgcagatgaaaaatcttgatgtggaaaaagggattgtttcgattaaaggcagggtatttgatttagtgtacttagacgaacaacaaggggataaagctaaagggttttttagcaagttgtttaaatgacgctgacgacacaattctatacaatgctggcgatgtccggtatgggtctctggcttggtgcttcgcttgatacataccggctctttgtcattcgtgccaaaacagccagatggctattatttattcatgatattcttttctggattgtgcaagggctgcttttcttttatgtcttgcttcatgtaaatgagggagaattcaggatttacatctttttagcggttctgctgggcgttgcgacgtatcagagcctttgcaaacgaatctatataaaaatactgaaattcttcatttaccttgttgtttctgtttatcaattcttcaaaaaactcattcagcacgtgttatttcgtcctattgtgtggacatgcggagcgatcatctggctggcggcatttttattcaagaaaacatacagcctgataggttttctcctgctgtgtctatataaaatagtcatggttctgtgttttccgatccgttttatcgcgaaacaatgtttgaaacttcttcctgtgaaaatgcgtctaacttttagacgttattttgaaaaaggtgcaggatttctcaaaaagaagaagaaactattgataaccataagaacgaccattacacggtttttgaagaaatgaaaggaggaccgtctggtttgaatttttccagggaacgaacgataactgaaatacaaaacgactataaagaacaagtagaacggcaaaatcagctgaagaaacgaagacgcaaagggctgtacagacggttaactgtattcggcgccctagtattcctgacggcaattgtgctggcaagctctgtatggtcccaaacatcttcccttagtgcaaaagaagaaaagaaagaacagcttgaaaaagaactcaaaagtttaaagacaaaacaaacggatttaaaagaagaaatatccaaattgaaagatgaggattacgtcacagagcttgccagaagggacttattcatgtctggagacggagaaattatcttcaatgtggagaagaagagcaagtagccttgttgacacttaaatttttatttaggtataattaagcaaacgatctttttataagcctaaggaggagcactttttttatgtcgattgaagttggcagcaagttgcaagggaaaattacaggtattacaaattttggagcatttgttgaattgcctggaggctcaaccggtctcgttcacattagtgaggtagctgataattatgtcaaagacattaacgaccacttaaaagtcggcgaccaagttgaagtgaaagtcatcaacgttgaaaaagacgggaaaattggtttatctattaaaaaagctaaagaccgtccgcaagccagacctagaaatgatttccgtccgaaagaatcttttgaacagaaaatgaataagtttttaaaagacagcgaagatcgcttgtcatctttaaaacgcaatacggaatcaaaacgtggagggcgcggagcaagaagaggataacttgctgctttctataaaataaatgaagcatccgttcatcccgacggatgcttttttattatcctcatcctctttaagagtcagaaaattacaacattaaagtttctgttgacgaaagagacaaacctttgtattatataacttgtgcttagaagcacaaaacaatatggcggtgtagctcagctggctagagcgtacggttcatacccgtgaggtcgggggttcgatcccctccgccgctaccatatttgtttggcccgttggtcaagcggttaagacaccgccctttcacggcggtaacacgggttcgaatcccgtacgggtcatcctaaaaaatcggtttctcttgcagaagccgatttttttcatttttagacaacattccggaaattcttttcataaacgaatatcaaggcagaaaccgtcgaagatttctttggtattgttaccttcttttgacaaaatcctatctgtgctttcgctataatgacaggcaacgaatataacaggtgggagatgagaggaatggaaaaagcagaaagaagagtgaacgggccaatggcgggacaagctttggaaaaactccaatcgttttttaacaggggcacgaagctggtgactcatcatttgcattcactgtttttctataaaggattcatttatgttgtcatcggatttttgcttggacgggctttcatattatccgaggtgcttcctttcgcacttcctttctttggagcgatgcttcttatcagaagagacaaagcgttttatgcggttttggctgtgcttgcaggtgcgctgaccatatctccaaagcactcattgctcatactggcggcattgctggcattcttcgtattttctaaagtggctgccttcattaccgacgatcgtgtaaaagcgctcccgattgtcgtgttcttctcgatggctgcagcaagagccgggtttgtttatgcccaaaatggcgtatttacaacctatgattatgtaatggctatcgttgaggctggactatcgtttatcttaacactgattttccttcagagccttccaatttttactgtgaaaaaagtgaaacaatcattaaaaatagaggaaatcatttgctttatgattcttattgcctctgttttaacggggctggccggcttgtcctaccaagggatgcaggcagaacatatattggctcgttatgttgtattgagtttttcctttattggcggagcaagcatcggctgtacggttggtgttgtgaccggcctgattcttggcttggcgaatatcggaaacctatatcaaatgagtctgcttgctttttccggtttattgggcggtttactgaaggaaggaaaaaaagcgggtgcagcaatcggtcttatcgttggttcacttcttatatctttatatggtgaaggctctgccggtctgatgacaacgctctatgagtcattaatcgcagtcggcctgtttttgctcacacctcaatctattacaaggaaagtggcgagatatattccgggaactgtcgagcatcttcaagagcaacagcaatacgctagaaaaatccgtgatgtcactgctcagaaggtagaccagttctccaatgtatttcacgcgctgtctgaaagctttgcaaccttttaccaagcgtcagacgaacagacagatgacagcgaagttgatctgttcttaagcaaaatcacggagcattcctgtcagacgtgctacaagaaaaacaggtgctgggtacagaactttgataaaacatatgatttaatgaaacaagttatgcttgaaacagaggaaaaagaatatgcatcaaaccgaaggctgaaaaaagagtttcaacagtattgttctaaatccaagcaggttgaagagctgattgaggatgagctcgcacatcatcatgcccatttgacactcaagaaaaaagtccaagacagcaggcgtcttgttgctgaacagcttttaggcgtttctgaggttatggccgacttttctcgggaaataaaaagagagcgagaacagcactttctgcaggaagagcaaatcatagaagcgcttcagcatttcggaattgagattcagcatgtcgagatctatagtcttgaacaaggaaatattgatattgaaatgaccattccgttcagcggacatggagaaagtgaaaaaatcattgcccctatgctgtctgacattctggaagaacaaattcttgtgaaagccgaacagcactctccgcatccgaatggatacagccatgtcgcctttggatcaacaaaatcatacagggtgtccacgggagctgctcacgctgcgaagggcggcggccttgtctccggcgacagctacagcatgatggagcttggagccagaaaatatgctgcagcaatcagtgacggaatgggcaatggcgcaagagcgcactttgaaagcaatgaaacgatcaagcttcttgaaaaaatccttgaatcgggaattgatgaaaaaatagcaattaaaacgatcaacagcatactgtctctaaggacaactgacgaaatatattccacgcttgacctatctattatcgatcttcaagatgccagctgtaagtttttgaaggttggatcgacgcccagctttatcaaacggggtgaccaagtcatgaaagttcaagcgagtaatctgccaatcggtattattaatgaattcgatgtggaggttgtgagtgaacagctgaaagcgggtgacctcttaattatgatgagtgatggtatttttgaggggcctaagcatgtggaaaatcacgacttatggatgaaacgtaaaatgaaagggttgaaaacaaatgacccgcaggagattgccgatttgcttatggaagaagtcatccgcacaagatccggccaaattgaggacgatatgactgttgttgtcgtccggattgatcacaatacaccgaagtgggcatccattcctgttccggcaatctttcaaaacaaacaagaaatttcataacgcttccgtataaatcaaatttcttctggcgaagatgggaatatatgaatctgagaatcctcgtattctccaggaggaatgaatgtgaacaacggacatttaaatcaaattttgctgataacggatggctgctcaaaccatggggaagacccgcttgcaatggctgcttttgctaaagagcaggggattacggtaaatgtcattggtataatggaagaaaatcaaattgaccctgaggcaatgaaggaagtcgaagggattgcacttgccggaggaggcgtgcaccaagtcgtttatgcatctcagctttcacaaactgttcaaatggtaacaaagaaagcgatgacgcaaaccttacaaggtgtagtcaatcaagaactgaaacagattctcggaaagaatgtggaaatggaagagctttccccggaaaaacgcggcgaagtcatggaagtggtagacgagcttggagaaacggtgcatcttcaggttttggttcttgttgatacaagtgcaagtatggcgccaaagcttccaacagtaaaagaggcgctgattgatttgtctgtaagcctcaattcccgaatcgggaataacgaatttgcgatgtgtatatttcccgggaaaaaacaagaggtcgagcttgtgctgaactggacaccgaagctgcaatctctttccacactctttgcaaagctttcgacaggcggcatcacgccgacaggtccggcgattcgtgaagcgacactgcagtttgaaaaaatacgctcaagaaggggcatgctggcagatgatgaacgacgctttgacgagtttggcatgtagcctcaagccgggtacgacaatcaaaggcaagtggaatggaaacacttatacattgcgtaaacagcttggtaaaggggccaatggaattgtgtatttggcagaagcatcagatggacatgttgccttaaaggtgagtgatgacagcctgtctattacttctgaagtgaatgtcttgaaatctttctcaaaggcccagtccgttacgatggggccttctttttttgatacggatgatgcctatattcccagtgccaatacgaaagtttcattttatgcaatggaatacataaaagggccgctgcttttgaagtatgtcagtgataaaggagcagagtggatacctgtattaatgattcagttgttatccagcttatcggtgcttcaccagcaaggatggatattcggcgatcttaaacctgataatctgatcgtaactggtccgcccgcaaggatccgctgcattgatgtgggcggcacgacaaaggaaggccgggcgataaaagagtatacggagttttatgacagaggctattgggggtatggaacaagaaaggcagagccatcctatgatctgttcgcagttgccatgattatgatcaacagtgtgcataaaaaagaatttaagaaaacgaaccagcccaaagaacagcttaggtctctcatcgaaggaaacccgctgcttcaaaagtataaaaaagtgcttttttcagccttgaacggagattatcaatccgcagatgaaatgaaaaaggatatgctagacgcggggcaaaaagcagcacaaagaaaacagcctataaaagcatcaccgcagcctgtcacacgacaaagacagcaaaaaccgcgccaaggaaaaataacgaagacgcgatataccctaaaacagaaaccggctaagtcgggggggttatttgaaacaacgctgatcgtgatcagtgttttagcgctttatttcgcctatattatctttttcttaatctgaatggtgcaaactgcagagcctatgcttcttctttgcttggaggggttgaaagtgttaggatatgaatatctttaaaatacctgctcattgtgaggaggacattgtgaaaagtgtcaaagattttttaaacaaacacaatcttacgttaaaaggggcgacaatcattgtaggcgtttctggcggtccggactcaatggctcttcttcacgcgttgcatacgttatgcggccgttcagcgaatgttattgcagctcacgttgaccatcggttcagaggtgcggaatccgaggaggacatgcgttttgtccaagcttattgtaaagctgaacagctcgtgtgcgaaacggctcaaatcaatgtaaccgcatatgcacaggaaaaaggactcaataagcaggctgcagcacgtgattgccgctaccagttttttgaagaaatcatgtcgaagcaccaagcggactatctagctcttgcgcatcatggtgatgaccaggttgaaacaatgcttatgaaactggctaagggtacgcttggaacgggacttgcgggaatgcagccggttagacgttttgggacggggcggatcatcaggccgttcttaaccattacaaaggaagagatccttcactattgccgtgaaaacggtttgagctaccggacggatgaaagcaacgccaaagatgactacacaagaaacagattcagaaaaacagtgctcccgtttttgaagcaggaatctccggatgtgcataaaaggtttcagaaagtgagtgaagcactgacggaagatgagcaattcttacagtcattaacgaaagatgaaatgaataaagtaatcacaagccagtctaatacatcagttgaaatcaattcctctcaattgcttgccctcccgatgcctttacaaagaagaggagttcaactaatattaaactatctttatgaaaacgttccatcatccttttcagcccatcacattcagcagtttctcgattgggcggaaaatggcggtccttcaggagtactggactttccgaaagggctgaaggtggtcaaatcatatcagacatgtttgtttacatttgaacaatggcagtgcaaaaatgttccctttgaataccaaattagcggagctgctgatgaaacggcagtgctccctaatggatatctgatagaggcaaagcattatgcggactcgcctgaagaacatgggaatgctgtttttatcacaagtgaaaaaaaggtgcggtttcccttaacaatccggacgagaaaagctggagaccggatcaaactaaaagggatgaacggctcaaaaaaggtaaaggatatatttattgataagaaactgcctctccaagaaagagacaactggccgattgtgacggacgcaagcggtgaaattatctggatacctggcttgaaaaaatcaatttttgaagatcttgtgattccaaacagcgaccgcattgtattacaatatagacagcatgaaaagtgtagggggcaagcaaaatcatgatgaaacatgatatcgagaaagtactgatctcagaggaagagatacaaaagaaagtaaaagagttaggtgcagaattaacgagcgagtatcaagatacatttccgttggcaatcggtgtgttaaaaggagcacttccttttatggcggatcttatcaagcatattgatacatatttggaaatggatttcatggatgtatcaagctacggaaattctacggtttcttctggagaagtcaaaatcattaaagatttggatacttctgtagagggccgggacatcttaattattgaagatatcatcgacagtgggttaaccttaagttatctcgtagagctcttccgataccgtaaagcaaaatcaattaagattgttacccttttggataaaccgagcggaagaaaagcggacatcaaagcagactttgttggttttgaagttcctgacgcgtttgtagtgggttacggacttgattatgctgagcgctatcgcaatctgccttatatcggagtgttaaaaccggcagtttatgaaagctgatcggcagcctgcttccgagatggttattgtttgtattggaatgattttctatggtactattgaacatagttgtgcttactgtgggaggaggtaaggaatgaatcgggtcttccgtaataccattttttatttacttattttattagtagtaatcggggttgtgagctacttccagacctcaaatccgaaaacagaaaatatgtcgtacagtacgttcatcaaaaacctggatgacgggaaagttgatagcgtatcggttcagcctgtcagaggtgtttatgaggtaaaagggcagctgaaaaactacgacaaagatcaatactttttgactcatgttcctgaaggaaagggagcagaccagatatttaacgctttgaaaaagacagacgtaaaggttgagcccgctcaagaaacaagcggatgggtgacgttcctgacgaccatcatcccatttgtcattatctttattctgtttttcttcctgctcaatcaggctcaaggcggcggcagccgtgtcatgaactttggcaagagtaaagcgaagctgtatacagaggaaaagaaacgcgtcaaatttaaagacgttgcaggggctgacgaagaaaagcaagaacttgttgaagttgttgagtttctgaaagatccccgcaagtttgccgagcttggcgccagaataccgaaaggcgtgcttttagtggggcctccgggtaccggtaaaacattgcttgccaaggcttgtgcaggagaagccggcgtacctttcttcagcatcagcggatctgatttcgttgaaatgtttgtaggggtcggtgcttcccgtgtgcgtgacttgtttgaaaatgcgaaaaagaatgcgccttgtttgatcttcattgatgaaattgacgcagtcggacgtcagcgtggcgctggtctcggcggtggacacgatgaacgtgaacagacgctaaaccaattgcttgttgaaatggacggattcagcgctaatgaaggaattatcatcattgctgcgacgaaccgtgcggacatcttggacccagccttacttcgtccgggacgttttgaccgtcaaatcacagtggaccgcccagatgtcattggccgtgaagctgtattgaaagtccatgcgagaaacaaaccgctggatgaaacggttaacctaaaatcaattgccatgagaacaccaggcttctcgggcgctgacttagaaaacctcttgaatgaagctgcgcttgtagcagctcgtcaaaacaagaaaaaaatcgatgcgcgtgatattgacgaagcgacggaccgtgtaattgccggacctgctaagaagagccgcgttatctccaagaaagaacgcaatatcgtggcttatcacgaaggcggacacaccgttatcggactcgttttagatgaggcagatatggttcataaagtaacgattgttcctcggggccaggctggcggttatgctgttatgctgccaagagaagaccgttatttccaaacaaagccggaactgcttgataaaattgtcggcctcttgggcggacgtgttgctgaagagattatcttcggtgaagtcagcacaggggcgcacaatgacttccagcgtgcgacgaatattgcaagacgaatggttacggaattcggtatgtcagaaaaactgggaccgttgcaatttggacagtctcagggcggtcaggtattcttaggccgtgatttcaacaacgaacagaactacagtgatcaaatcgcttacgaaattgatcaggaaattcagcgcatcatcaaagaatgttatgagcgtgcgaaacaaatcctgactgaaaatcgtgacaagcttgaattgattgcccaaacgcttctgaaagttgaaacgcttgacgctgaacagatcaaacaccttatcgatcatggaacattacctgagcgtaatttctcagatgatgaaaagaacgatgatgtgaaagtaaacattctgacaaaaacagaagaaaagaaagacgatacgaaagagtaattcgctttctttctaaaaaaactgccggctgacgctggcagtttttttatgtaaatgatgggctcagctgcggcttttacaatcatccaattctggtatcgatttgtttacaaatgagccgctgatcgtgtatggtattgtagaatgtttgtaaaaagtaaagtagagaaactattcaaaagtggtgatagaggttgttactggttatcgatgtggggaacaccaatactgtacttggtgtatatcatgatggaaaattagaatatcactggcgtatagaaacaagcaggcataaaacagaagatgagtttgggatgattttgcgctccttatttgatcactccgggcttatgtttgaacagatagatggcattattatttcgtcagtagtgccgccaatcatgtttgcgttagaaagaatgtgcacaaaatactttcatatcgagcctcaaattgttggtccaggtatgaaaaccggtttaaatataaaatatgacaatccgaaagaagtgggggcagacagaatcgtaaatgctgtcgctgcgatacacttatacggcaatccattaattgttgtcgatttcggaaccgccacaacgtactgctatattgatgaaaacaaacaatacatgggcggggcgattgcccctgggattacaatttcgacagaggcgctttactcgcgtgcagcaaagcttccgcgtatcgaaatcacccggcccgacaatattatcggaaaaaacactgttagcgcgatgcaatctggaattttatttggctatgtcggccaagtggaaggaatcgttaagcgaatgaaatggcaggcaaaacaggaaccaaaggtcattgcgacaggaggcctggcgccgctcattgcaaacgaatcagattgtatagacatcgttgatccattcttaacccttaaagggctggaattgatttatgaaagaaaccgcgtaggaagtgtataggaggtttagtaatggattatttagtaaaagcacttgcgtatgacggaaaagttcgggcttatgcagcgagaacgactgatatggtaaatgaggggcagagacgccatggtacgtggccgacagcatccgctgcattgggccgcacaatgacagcttcacttatgctcggcgctatgctgaagggcgatgataagctgaccgtgaaaatcgagggcggaggtccgatcggagctattgtagctgatgccaatgccaaaggagaagtcagagcctatgtctctaacccgcaagttcattttgatttaaatgaacaaggcaagcttgatgtcagacgtgcggttggaacaaacggaacgttaagtgtcgtaaaagatttaggtttgcgcgagttcttcacaggacaagtagaaatcgtttcaggagaattaggcgatgatttcacttactatcttgtgtcatctgagcaggttccttcatcagtgggcgtaggtgtgctcgtaaatcctgacaataccattcttgcggcagggggctttattattcagctgatgccgggaacagatgatgaaacaatcacaaaaattgaacagcgtctatctcaagtagagccgatttctaagctcatccaaaaaggactgacaccagaagaaattttagaagaagtcctaggcgagaaacctgagattttggaaacgatgcctgtcagattccattgcccttgttcaaaagaacggttcgaaacagccattttaggactaggcaaaaaagaaattcaagatatgatagaagaagatggacaagccgaagcagtatgccatttttgtaatgaaaagtacttatttacaaaagaagagctggaagggcttcgtgaccaaactacccgctaagctctttagcgggtttttaatttgagaaaaggggctgaaagcaggtttgaaatcaagaacaatctggaccattattttaggggcgctgttggtttgctgtattgctgttgcatatacgctgacgaaatcccaagccggcgcatcgtcatccggtgagtctattgcgactatcgggggcaagagtgtgacaagagaagaatggctgaaagaaatggaagaccagtatggtaagtcaacgcttgaagatatgatcaatgtccgagttgttgagcagctggctaaaaagaacaaccttaaaatatccaaaagcgaagttgatcgtgagtttttgctgattaaagcggtcaataattccttttacgaagatgaacatacgacggagaaagagtggaaagaccaaattcgttataatatcctccttgaggaattattaacaagggatatcgatatctcaaacaaagaattggaatcattctatcataaaaataaggaactatatcagtttgatgattcgtatcgaattcggcacattgttgtaaaagatgaagaagaagcgagagaagtcctgaaagaactgaaaggcggatcaagctttgaagctgtcgctgccgaaagatctacagacagatatacatcaccatacggcggagatttaggttttgtcacagaggcatcagacaacattccatcagcatacattgaagaggcgaaaacactcaaagaggatgaatggtctcaggaaccaataaaggtcagcaacggatatgccattatccagctgaaagaaaaactaaaggcaagaacgttctcatttgatgaagtaaaggaccagatcagacggcaaatcgcaatggatcagctaggcgataaagcgacagttaagaccctttggaaagaagccgatgtatcttggttttatggggaaaaaagtactaagtgattgacaaaaaattttgaaattgatagattatatacataataccaatacaaatagtcggaaattgaggtgtcgagaatggtacgtgtagcaaactccattactgaattaattgggaatacgccaatcgttaaattaaatcgccttgcagatgaaaacagtgcggatgtatatttaaaacttgaatacatgaaccctggaagcagtgtaaaagaccgtatcggtttagccatgattgaagcggctgaaaaagaaggaaaattaaaagccggtgatacaatcattgaaccgacaagcggaaatactggaatcgggcttgcaatggttgctgctgctaaaggattaaaagctattttggttatgcctgatacaatgagcatggagcgccgcaaccttcttcgcgcatacggtgctgagcttgtgctgactcctggcgcggaaggcatgaaaggtgccattaagaaagctgaagagcttgctgaaaagcacggatactttgtgccgcagcagttcaacaacccgtctaacccagaaattcaccgccaaacaacaggtaaagaaatcgttgagcaattcggtgatgaccagcttgacgcatttgtagccggaatcggaacgggcggaacgattacgggagcgggcgaagtgctgaaagaagcatacccttccatcaagatttatgctgttgaaccgtcagattccccagtgctttcaggaggaaaaccaggcccccacaaaattcagggaatcggagctggattcgtgccggacatcttaaacactgaagtatatgatgaaatcttccctgtgaagaatgaagaagcattcgaatatgcccgcagagctgcacgtgaagaaggaattctcggaggcatctcatcaggtgcggcaatttatgctgctcttcaagtagcaaaaaaactcggaaaaggcaaaaaagtattggccatcattccaagtaacggcgaacgttatctaagcacgccgctgtatcaattcgattaaaaaaagccaaaactcccggtccgccgggagtttttttatatttcgtgcatcaaatatgccatgtctgcgacgaatgttattcttggaagagaaattcacttttttcactcacaacattgctttacaattaaaaacaagtaaaaaagaaaatagaggaatgatacaaatggcacaacgcagaccggcaggcaaaaaagtaccttttcaaaaagactcattcttacaacaatttgagaaacttgcgcaatcccgaaaacaccatgtacttctcgaaagtgcaagaggcggcagatacagtatagccggtcttgatccaattgcgactgtgaaaggaaaagacggaataactacaattaagcatggtgatgagatgctgtttaaagaaggtgatccattacgggccttccacagctggtttaaaacgctggaaacagaaacgaatcatgagttccctgactttcaaggcggggcaatcggttttctcagctatgattacgcacggtacattgaaaattttaaaatgctctcattagatgatctagaaacaccagatatttattttcttgtttttgatgatatagcagtttatgaccatcaagaagagtctctatggctgattactcatgttaatggttctgatcaggaaacagcggatgtgaagctatctgagttagagcagatgtggctgactgagcttcccgctgtctcttcgcgagagatgaaccctgaaacagatggttccttcgcggcgccatttaccgaggatgggttctcacaagctgtagagaaaatcaaacaatacattgccagtggagatgtgtttcaagtcaatctatcaataaggcagtcacagtcactgtctgcccacccatatcaaatttacaaaaccttgagagaagtaaatccttctccttatatggcgtatttagaaacacctgatttccaaatcatttgcggatcgcctgaactgcttgtcagcaaaaagggcaagctattagagacgagaccgattgcgggcacccgttccagagggaaaacaaatgaagaagacgaggcgcttgcaaacgaattgatacacaatgaaaaagaacgcgcggaacatgtcatgctggttgatcttgagcgaaatgatctgggaagagtatcacgttacgggtctgtgcgcgtaaatgaattcatggcaattgaaaaatactcgcatgtgatgcacattgtgtctaatgtccaaggtgaactgcaggatgggtatgatgctgtagatattattcatgctgtgtttcccggaggaaccattactggtgcaccgaaagtaagaacgatggaaattatagaagaacttgagccgacacgccgagggctttatactggatctataggatggtttggatataatcacgatctgcagtttaatatcgtcattcgaaccatttatgcaaccggagggcaggcatttatgcagtccggcgcaggagttgtgattgattctgttccgaagcacgaatacaaggaatcattcaaaaaagcttttgcgatgcaaagagcattagagctgagcaaagaagagacaaaaattagatgaggtgagcggagaaatgattttaatgattgataactacgattcattcacgtacaacttggtacagtatttgggcgagcttggggaagagctggttgtgaaacgcaatgacagcatcacaatcggagaaattgaagaactgtctccggactttctgatgatatctcccggaccgtgcagccctgatgaggcgggaatcagcctcgaagcaattaaacatttcgcagggaaaattcctattttcggtgtatgtctcggacatcagtccatcgcacaagtgttcggtggtgatgttgttagggcagaacggcttatgcacgggaaaacctcggatatcgagcatgacggcaaaaccatttttgaagggttgaaaaacccccttgttgcgacgcgataccactcgctgatcgtaaaacctgagacgctgccaagctgttttacagtaacagcacaaacgaaagaaggagaaatcatggctattcgccacaatgacctcccgatagagggcgtgcaatttcacccagagtctattatgacctcctttgggaaagaaatgctcagaaattttattgagacatatcgcaaggaagttattgcgtgatgatatatgtgaacggccggtatatggaggagaaagatgcagttctttctccttttgaccatgggtttttatatgggatcggtgttttcgaaaccttcaggctctacgaaggctgcccgtttttgcttgattggcatatagaaaggcttgaacgcgcgcttaaggatctgcaaatcgaatataatgtttcaaagcatgagatccttgagatgctggacaagctgcttaagctaaatgatatcaaggatggtaatgcccgcgtcagactgaacatatcagcgggaatcagcgataaaggctttgtcgcccagacgtacgataagccgaccgttttatgctttgtgaatcagctgaaaccagaaagtcttcctttgcaaaaagaaggaaaggttttatcgatacggagaaacactccagagggatcgttccggttaaaatctcatcattatctaaataatatgtatgcgaaacgggaaattggaaatgatccgcgtgtcgagggaattttcttaacggaggatggagctgttgcagagggtatcatatctaatgtcttctggagaaaaggtcgctgtatctatacgccatcgcttgataccggtattctggacggcgtcacgagacgttttatcatagaaaatgcaaagaatatcggcctggagctcaaaacgggccgatatgagctagaagctctcttgacagctgacgaagcgtggatgacgaactcggttcttgaaatcatcccgtttactaaaatagaagaagtaaactatggaagccaaagcggagaagcaacctccgctcttcaattgttatacaaaaaagaaataaagaacatgattcatgaaaagggaggaagagcatggcgcagcacacaatagatcaaacacaagtaatccacactaagcccagcgctttatcatataaagagaagacgctggtgatgggaattttaaacgtaacgcctgactctttctcggacggcggaaaatatgacagcttggacaaggcgctgctgcacgcgaaagagatgatcgatgatggtgcccatatcattgatattggaggggaatcgacaaggcctggcgctgagtgcgtatctgaggatgaggagatgtccagagtcattccggtgattgagcggattacgaaagagcttggtgttcctatttctgtagacacgtacaaggcttctgtcgcagatgaagcagtgaaagccggtgcatccattatcaatgatatttggggagccaaacatgatccgaagatggcttccgttgcagctgaacataatgttccaattgtactcatgcataaccgccctgaaagaaactacaatgacttattgccggatatgctgtcggacttaatggagagtgtaaaaattgctgttgaggccggagtagacgagaagaacattattcttgatcccggtatcggtttcgcgaaaacctatcacgataacttggcagtaatgaacaaactagagattttcagcgggctggggtatccggttcttctggcaacctcccgaaaaagattcatcggacgtgttctggatcttccgcctgaggagcgggctgagggcacaggcgcgactgtgtgtctcggcattcaaaaaggctgtgacattgtcagggtccatgatgtaaagcaaattgccagaatggcgaaaatgatggacgcgatgctgaataagggaggggtgcaccatggataaagtttatgtagaaggtatggagttttacggatatcacggtgtgttcaaagaagaaaacaaacttggccagcggtttaaagtcgatttaaccgctgagctggatttaagcaaagccggacaaacagacgaccttgagcaaacgatcaactatgctgagctctatcacgtatgtaaagatatcgtggaaggggagcctgtaaaattggtagaaacgctggcggaacgtattgctggcactgttctcgaaaaatttcagcctgttcagcaatgtacggtgaaagtgattaagccagacccgccaattcccggacactataaatcagtagcaattgaaattacgagaaaaaagtcatgaacaacatagcttatattgcacttggatctaatattggagatagagaaacgtatttaaggcaagcagtggcttcactgcatcagcatgctgcggtgacagtcactaaagtgtcgtctatttacgaaactgacccggtcggatacgaagatcaagctcaatttttgaatatggctgttgaaatcaagacatcattgaacccttttgaactccttgaactgacgcagcagatagaaaatgaattaggcagaacaagggaagtaagatgggggccgcggacggcagaccttgacattttgttatttaatcgtgaaaatattgaaacagagcaactaattgttccgcatccgagaatgtatgagcgtttgtttgtccttgcgccgcttgcggaaatttgccagcaggttgaaaaagaggctacaagcgccgaaacagaccaagaaggtgtaagagtatggaagcagaaatctggggtagacgaattcgtgcattcagaaagctgaaaggttatactcaagaaggatttgcaaaagcattaggtatatcagtttctattctcggcgaaattgaacgcggaaaccgattgccgtcagctgccatcattcaagatgcagcagatgttttaaatataagtgcggacgaattggcgccgccagaaaaatagaacaaatgaaaggaggagaaaaattgttcaaaatcggagatattcaattgaaaaaccgggttgtgctcgcacctatggctggtgtctgcaactctgcgttcagattgactgtaaaggaattcggagccggattggtatgcgctgaaatggtcagtgacaaagcgatcctttacaacaatgcaagaacaatgggtatgctttatatcgatgaacgtgagaaaccactcagccttcaaattttcggaggaaaaaaggaaacccttgtggaagcggcgaagtttgtagaccaaaacacaactgctgatatcattgacattaacatgggatgtcccgtgccgaagattacaaaatgcgatgcgggagccaaatggcttctcgatcctgataagatttacgaaatggtttctgcagtagtggatgctgttaataaaccagttacagtgaaaatgagaatgggctgggatgaagaccacattttcgcagtgaaaaatgcacaggctgtagaacgtgcgggtggtaaagcagttgcgcttcacggccgtacgagagtgcagatgtacgaaggaacggcaaactgggatatcatcaaagaagtaaaacaatcagtatcgattccggttatcggaaacggcgatgttaagacaccgcaggatgctaagcgtatgctcgatgagacaggagtagacggggtcatgatcggacgcgctgcattgggcaacccgtggatgatttaccgtacggttcagtatcttgaaacaggtgaattaaaagaagagccgcaagtacgcgaaaaaatggccgtatgcaaactgcatcttgaccgcctgattgacttaaaaggtgaaaacgtagcggtaagagaaatgagaaagcacgctgcatggtatctgaaaggcgtgaaaggcaatgcgaacgttcgtaatgaaatcaatcattgcgagacgagagaagagtttgtacagcttttagatgcatttacggttgaagttgaggcaaaagagcttcaaaatgcaaaagtaggataatactcacctctatttgctgctcactgctagttttacgctggcagtttttctgcttttttcatgaaacaatatctgtaatggagtgataacaatgagtcaagaagagcataatcatgaagaattgaatgatcagctgcaagtcagacgcgataaaatgaatcagctgagagataacggcatcgatccattcggcgcacgttttgaaagaactcatcagtctcaagaagttatttcggcatatcaagatctaaccaaagaagagttggaagaaaaagcgattgaagttacaatcgcaggccgcatgatgacaaaacgcggcaaaggaaaagccggctttgcccatcttcaggatttagaaggccaaatccaaatctacgtaagaaaagacagtgtcggtgacgaccaatatgaaatcttcaagtcttctgacctcggtgatcttatcggcgtaaccggaaaagtcttcaaaacaaatgtaggcgaattgtctgttaaagcaacttcctttgaattgctgacaaaagcgcttcgtccgcttcctgacaaataccatggtttaaaagacgttgagcagcgctaccgtcagcgctacctggatcttatcgtaaacccagacagcaaacatacgtttattacacgaagcaagatcattcaagctatgagaagataccttgatgatcatggatacttagaagtagaaacacctacaatgcacagcattcctgggggagcttctgcacgtccgtttatcactcaccacaacgcgttagacattccactctatatgcgtattgctatcgaactgcacctaaaacgtctaattgtcggcggtttagaaaaagtatatgaaatcggccgtgttttccgtaacgaaggtgtctctacacgccataaccctgaatttacaatgattgagttatatgaagcatatgcggactataaagatatcatgagcttaactgaaaaccttgtcgctcatatcgcccaagaagtgcttggcacaactacgattcaatacggggaagagcaaatcgaccttaaaccggagtggaaaagaatccatatggttgacgcagtcaaagaagcgactggcgttgatttctgggaagaggttactgttgagcaggcgcgtgaatatgcaaaagaacatggtgtggaaattaaagattctatgacagtagggcatatcatcaacgaattcttcgaacaaaaaattgaagaaacgcttattcagccaacgtttatttacgggcatcctgtagaaatttctcctcttgctaagaaaaaccctgaggacccgcgttttacagaccgttttgagctgtttatcgttggccgtgaacatgccaacgcgtttacagagctgaatgatcctattgatcaaagagaacgctttgaagcgcaattaaaagagcgtgaagccggtaatgatgaagctcatctaatggatgaagactttgttgaagctctggaatacggtatgccgccaacaggaggtttaggcatcggtatcgaccgtctggttatgctgctgacgaatgccccttctattcgcgatgtgctgttattcccgcaaatgagacaacgctaataaagaagagcggtatcctccatagggaaaggatgccgctctttttaaattccttagtatttcttcaaaaaaactattgcactattatttactaggtggtatattattattcgttgccgctaaacaaggcgataacgaaaaaaagaacttcaaaaaaagttattgacttcactgagtcaacgagttataataataaagtcgcttgaacgaagtgaacaaaatgatctttgaaaactaaacaagacaaaacgtacacgttttgtcttgtttagttttcaaagaactttgtttaccgctcgtttaagcgactttattatcataacatttaccgtcgctactgtcaacaacttttttaacattttcttttcaaaaaagctgttcgtcatcagcgacgtatactagaataacaccttcggttgtctaagtcaatacataatatcaattaaatgataaattgcttaataacgactaacgcagctattccgggtatccctaaaattccgctgatagctgttgtaaccagattaatcggcacatgaatgccaagactgccgccaaacatatttacacaaaccagcagcaaagcacctgccacaaatttaacagctgtgatgccaatccactttaaaggcttcgcagctgaacctgataaaaaaagaagaataaccaatcctaaaataatcccaataataaaaataggctccatgaatcttctcatctccttcgcttgttctagtacaagcttatgagaagatccaggagtttagaccacttacttccaccggctgatttttaaatttcgctgcttcgcttcccttaagtaaaaaaaatacttcgcttcagctactttcagttcgtataacacttcagcagacggttctaagcttttttcgaccagctttttttgcctgttccactcttccttttgcttaaaaagctgctcggttagtttttcatcaaactctcttcttaatgttttcttgcgaagaaaacccatggatcgctttttcctccttacaattcgcgtcttccttcaagtgctttagaaagagtgacctcgtcagcatattccaagtcaccgccgacgggcagtccgtgggcaatacgggagagcttaataccagacggcttgaggagccttgatatatacatcgccgttgcttccccttctatattagggtttgtcgcgaggatcacttctgtcacttgatcatcctgtaatcgttttaacaattctggtattttaatatcctccggtccaatgccgtccattggagaaatagcgccgtgaagaacgtgatactgtccgttgtattccttcattttctccatagcgataacatccttagggtcttgcacaacacagataacagacttatccctgcgcgtatcttcacatatatagcaagggtcctgatctgtaatatgcccgcaaactgaacaatatgtcaggttgcgtttcgcatttactaatgctttcgcaaaatctaatactacatcttctttcatacctagaacaaaaaaagccagacgaaccgctgttttcggtccgatccctggcaatttcataaagctgtcaatcagctttgatattggttcaggatattgcatgttcttttatccccctagaataaacctggcatgttcattccctttgtaaattgacccattgtttcgtttgtgatttcgtcaacttttttcaaagcttcattcgttgcagcaagcactaaatcttgaagcatatcaatatcttcaggatcaacgacttcttctttgatgataacatccaggatttctttttggccgtttgcttttactgttaccataccgccgcctgcagttccttcaacaaccttttctgcaagctcttcttgagccttcgccatgtccttttgcattttttgcatttgtttcatcattttttgcatattacccattccgccacgcatagcattcactctctttcattttgttagtcttttatttcaattaaatccgctccaacaagctttttcgcttcggcaataagcgggtcttcttcagccggttcatttgatccttcattttcctgctgatgatcttctaaaaattcttctcttattttaccccattgtgcttctggaacgccaatcaaatccattctttttccgagcatcgattctaaaatctgctcaagattagtccggactccgttgttatcctcagcaaccattttacaatgaatttcatatttgaatttcagaacaaatgccgccgatccggcagccacaggttcactgtcattcagcaaagcggcatgcgatactttgttttgctgtttgagatgagcaagaagcttgccccaactgtttctgagcagatcaagatccggtcttgtggcttccttcaaaatctcatgaattctgcctactggcgctttgtaattggatttcccgccctttggcacacgcggcgcttcttttttcgggctttccgcagctgcttttatgcccgttgttttgagccgctctacttcctgttcgagctgctggatttttttcatcagcatatccacttccgggagatcagcagcagattgatgtgaggtttggcaaatcttcacaacggccacttcgaaaaagatacgcggatgatttgtccatttcatttcctgatggctcttgttcagaatatcaatcatttcatatagggcctgagccggaatttgttcacttagtttccggaacgtttcatcgacttttactttctcaagcactccctctaagccaggggctgttttgtacagcagcatgtccctgaaatagaaaatcatatcttctatcagcttagctggatcttttccttgctgaagcaattcatttaatgtttccagtgcgtcagaaacgtttttatcatgcagggattgtgcaagcttcccgatatataattgagaaacagcacccgtaattaaaagcgcatcttcgactttcaggatatcgccgctgaatgatatggcctgatcaagaaggctcagggcatccctcatccctccgtctgcagcactcgcgatgatatccagcgatccttcctccacttgcagctgttcagcatcaacaattttattcatgcgccctacaatcgcttgggaggtaattcgtttaaagtcaaaacgctgacatctagagataatggttaaaggaattttgtgcggttcagttgttgctaatatgaagatacaatgctcaggcggctcttctaatgtttttagtaatgcattaaaagcgccgatagaaagcatatgcacctcatctatgatatataccttatatgtgacggccgatggggcaaacttcactttatcgcgaatgtcacgaatctcatcaacaccgttattagaagcggcgtcaatttctatgacatcggatattgacccgtttgttatccctttacaggccgcacattcgttgcatggctcatcaacaggagcatgttcacagttgacagccttagcaaatattttggctgcactggtttttccggttcctcttggcccggaaaacagataggcgtgagaaaactttttttgcaaaagggcattttgcagcgtttttgtaatgtgttcttgtccgaccacatcttcaaagcgctgaggcctgaatactcgatataaagcttggtaactcacgggtttgccctcctccgttattcatcattcccattatacatgaaccttgtttcgattccaaaagctctttttacataacaaaaaactcacctaatgttaggtgagtctgaaaatttgatgattgatttaccgtgcaccttctgtcgattcgctaccctaagcgttacttaagcagttagctcggcccaggcaaccctgcggcacatgagaggtttcacttaatgctgcttccttccggacctgacatggttcatgaattcccattgcgcaggacccaaacgtcaacaccacttacttaaggcaggccttaaagtaaacgaacctcgagaagggattcggccctgctagagcggattgcaggtacagggcaccgctacctccccgcttagcacggcaaaataaatatcaaattttatgttgcatctattacgatgcacacttaagtatatctgtttcccctaaaaattgcaaccgtactattcagacaagtttttcctggcggctttcttcttttttcttagttctctgaaaaacgcactgagcattccgccgcattcttcctcaagtacaccgctcaccacttcagcctgatgattaaagcgttcctcctgaagaaggttcattagtgtgcctgaacagccgcctttcggatcaaatgcgccaaaaaccactttttccactcgagaaagtacgacggcaccagcacacattggacatggctcaagcgtcacataaagagtcgcaccttccagccgccatgttccgagtgccttacatgcttcatcaattacaagcatttctgcatgggcaatagatcgttgctcagtctctcttaaattatgtgcacgcgctataatttcatcattaacgacaagcaccgcacctattggcacttcacctttctcttcagcctttttcgcttctttaattgcttctttcatataaagttcatcttgtgtcataaggataagctctcttttcaaagttttttcatcgcctaaaaaggctacatattaactataactgaaacggaaaggagactgtcgattgtccaaagcagatacagcccttctcattgtagacatgatcaataattttgaattcgatatgggagaaaccctcgctaaaaaaacagaaaaaatcgttcctcatattttatcattaaaggagcacgcgagacaaaatgaatggccgattatttacatcaatgatcattatggactttggcaagctgacattaaaaacattcagcaagaatgcacaaatgaaagaagcaaggatatcatcacaaagatagctccgaaagatgctgattattttttaatcaaaccgaaacattccgctttctacgaaactgcacttcacacccttcttactgagttgcaggtgagacatattatcttaacaggtatagccggcaatatatgtgtgctgtttactgctaatgacgcttatatgagggaatacagcatcacgattcctaaggactgtatcgcgtcaaacagtgacgaagataacgaattcgccttaactatgatggagaatgttcttttcgcagaaattacgacggaagaacaaattacagaaaaataaacatgatcagcgcttttctttcatacattgatagcgatatgaaaggaggcgtttttcattcaaatttatgtggtaaaacaaggcgacactctttctgctatcgcttcacaatacagaacaaccgcaaatgagatcgctgaaacgaatgaaataccgaatcccgacagccttgttgtcggacaaaccattgtcattccaatagctggccagttctatgatgtgaagcgaggtgataccctgacatctatcgcccggcagttcaatacaacggcagccgagctcgcaagggttaaccgcatccagttaaataccgtgcttcagattggtttccgtttatacatcccaccatctcctaaacgagacatcgaatcaaatgcttatttggagccccgaggaaatcaagtcagcgaaaatctccagcaggcggccagagaatcgtcgccctacttaacgtaccttggcgcattcaacttccaggcacagcgtaacggaaccttagtcgcaccgcctttaacgaatttaaggagcattacagaaagtcaaaatacaacattgatgatgattataacgaacctagaaaaccaagcattcagcgatgaacttggccggatccttttgaacgacgaaactgtaaaaagacggcttctaaatgaaatagtcgagaatgccagaagatatggcttccgtgacattcatttcgactttgaatatttgcggccccaggatagagaggcttataatcaattcctccgcgaagcaagggatctttttcatcgagagggcttagaaatttctacggctcttgctcctaaaacaagtgcaacacagcagggcagatggtatgaagctcatgattacagggcacatggccaaattgtcgactttgttgttctcatgacatatgaatggggctatagcggcgggccgcctcaagcggtttctccaattggacctgtccgtgatgtcatagaatatgctttgactgaaatgcctgcgaacaaaattgtcatgggccagaatttatatggatatgactggacgctgccatatacagcagggggaactccggcaagagcagtaagccctcagcaagccattgtcatagctgatcagaacaatgcttccattcagtatgatcaaaccgctcaagctcctttcttccgctatactgatgcagaaaacagaaggcacgaggtatggttcgaggatgcccgctcgattcaagcaaaattcaatctgattaaagagctgaatttaagaggcatcagctattggaagctgggtctttcctttccacaaaactggctgctgctgtctgatcaatttaatgttgtcaaaaagacgtttcgataatttggaaacgtctttttttcatgggggcacccaagggttgtgatacaatatgaaggtcggtaactgacgcacgtttttcagatataaggaggattccgatgaatacagccccttttattgcaatagaaggtcctatcggggcaggaaaaacaactctcgcaacgatgctctcacaagaattcggattccctatgatcaatgagattgtagaggataacccgtaccttgataagttttatgacaatatagaggaatggagcttccagctcgagatgttttttctttgtcacagatacaaacagcttgaagacaccagtgatcactttttaaaaaagggacagcctgtaatagctgattatcatatttataaaaatgtgatttttgcggaacgcaccttgtctccacatcagctggaaaaatacaaaaagatatatcacctgctaacggatgatctgccaaagccgaatttcatcatttacataaaggccagtctgcctacattgctacaccgcattgaaaaacgcgggcgcccctttgagaaaaaaattgaaactagctatttggagcagctgatttcagattatgaagtcgccatcaagcagctgcaggaagcagaccctaaacttacagtgttaaccgtagatggtgattcaaaggatttcgttttgaataagagcgactttgaacgcattgccgcccatgtaaaggagcttatcgtatgaaggaacatcatatccctaagaattcaattattacagtagcaggaacagtaggtgtcggaaaatcgactttaacaaaaactttagctaaacggcttggatttaaaacatctttggaggaagtcgatcataatccatatttggaaaagttctatcatgattttgaacgttggagctttcaccttcaaatttacttcttagctgaacgcttcaaagaacagaaaacaatttttgaagccggcggaggttttgtacaggatcgttcgatttatgaagatacaggaattttcgcaaaaatgcatgctgataaagggacaatgtcaaaggttgattataagacttacacaagccttttcgaagcaatggtaatgacaccgtatttcccacacccagatgtgttgatctatttagaaggagatctggagaacattttaaaccggattgaacaacgcggccgtgagatggagcttcagacaagcaggtcttattgggaagaaatgcatacacgctacgagaactggataagcggttttaatgcctgccctgttttaaaacttcgcattgaagattatgatcttctgaacgacgaaaactcgattgaaaatattgtagatcaaattgcttcagttattcatgataatcaaaaaaagtgaatctcagtcgagattcactttttctttaaaataaaaaatccgccgcaccgaatgcaacggacaaaacaatctccaatatatgcttgtgtttcattagaattaaaatcaatatggcggaggaagagggattcgaacccccgcgggctttgacacccctgtcggttttcaagaccgatcccttcagccggacttgggtattcctccgtatcgacaagacttactatatcacgtatgttctcgtgtggtcaagcatttttaaaaactttttttgtttttatgaaaatgccatgtttacataagcaaaaaggcgcaccttgtcaggcacgcctttccataatttacggtttcattacttctctattccccatataaggacgaagcactttcggaatcacaacgcttccgtcttcctgctgataattttctaagatagcggcaactgttcttccaaccgccagtcctgaaccgttcagtgtgtgtacatgctcaggcttgcctttcgcttcacgtctgaaacgaatattcgcacgtctcgcctggaacgcttcaaagttgctgcaagaagaaatttctcgatatgtgtcttggctcggaatccaaacttcgatatcgtattttttcgcagccgtaaagcctaagtcacccgtacacatgctcatgacacggtatggaagctcaagcagctgaagaacccgttctgcttggtttgtaagcttctctaattcttcataagaatcttcaggcttcacaaactttacaagctcaactttattaaattggtgctgacgaattaatccgcgtgtgtcacgtcctgctgaaccagcttcagaacggaagcaagcactgaatgccgcatagttgatcggcaggctgtcacctgaaaggatttcatcgcgatgcatgtttgtaatcggcacttccgccgttgaaattaagaaataatcttcttctctgattttaaatgcatcctcttcaaatttaggaagctgtcctgttcccgtcatgcttgcgcggtttaccatatatggcgggatcacttcagtgtagttatactcatccacatgcagatcaagcataaagttataaagtgcacgctccagacgagcacctaagcctttatagaacacgaaacggcttcctgttactttggcagcacgttcaaaatccagaatacccagctcatccgcaatatcccagtgcggcttcggctcataagcaaatgaaggcttttcaccccatttacgcacttctacgttgtcgtcttctgtttcaccgacaggtacagactcatgcggaatattcgggattgagagaaggattgtatcaagctcagcttccactgttcgcaattcttcatcaagctttttaatttcctcgccgacttcacgcatttctttaataatgtgatccgcttcttttttctcacgcttcagcacagcaacctgctgagaaacttcatttcgttttccttttaactcttcaaccttgccgataagctctcttcgtctatcatccagcgcctcaaacttatcaaaatcagttaagtcttcgcctttgtgtacaagctttgctttaatttcttgaaaatttgctctcagcattttcgtatcaagcatgcgaaacactcctttttttattgatttgtcgaaaataaaaagagccctcatccccataaagggacgagagctctcgcgttgccaccctgattgaaaacaaatcaaagactcgttttccactttcaaacataacggttatcccgtaaatgcctacttgtttcagcatttcgctcaaggatggattcagacagcatctttcaccgattcgcaccaaccatcggctctcttagaaagagaggctccctactagttcctatcaacgcttttcgatctttatttgtgcttataatgtactataagtttccacagctttcaactgttttatacaagtgccttttgcttgtattccttaaccatttcaacaaacagctgtgttactcggtgatcttctgtcagctccggatggaatgagcagccaaggaattgcccctgtttcgcggctacaatacgaccattatgctccgatagaacttcaacattttcaccagcttctaaaatatgcggagcacggatgaatacccctgtaaaaggctcgtccaagcctttaattgttaaatcagcttcaaagctgtcaacctgccggccaaatgaattacgttctacaaccacattcagaagacctaaatgaggattatctgaaccggcaatttcttttgctaatataattaatccggcacatgttccaaacatcggtttgccctgagcagcgaattcacgaagcggctccatgaattgatacgtatcgatcaaacggcgcatcgtcgtgctctcaccgcccggcaaaatcaacccgtcaacttcgttcagctgctccggacgttttacgacaagaccagccacgccgcatgcttcaatcgcatggatgtgctctctaactgctccttgaagtcctagtacacctattgttaacatgtcagcagcgctcccatgttcttaccagccgcgttcttgcatacgctgttctggaagtaagtttgagatttcaatccctttcattgcagtaccaagctcttttgacaactcagcgatcaatttgtaatcagtaaagtgagttgttgcttccacaattgctttcgcaaatttagcagggttgtctgatttgaaaataccagaaccaacaaatactccgtcagcaccaagctgcatcatgagagcagcatcagctggagttgctacgccgccagcggcaaagttaacgacaggaagcttgccgtcttttttaatttgaagaagaagctcgtaaggagcacctaggtttttcgcttctgtcattagttcatcctcactcatcgcaactactttgcgcacttgagcgttaactttacgcatatggcgaacagcctcaacaatattacctgttccaggctcaccttttgtgcgaagcatagaagcaccttccgcaatacggcgtgttgcttcaccaagatcacggcagccacatacaaaaggaactgtgtattcatttttatttaaatgaaattcttcgtcagccggcgtcagaacttcactttcatcaatatagtcaacacccatagcttcaagcacacgcgcttcaacaatatgtccgatacgcgcttttgccattaccgggatagatactgcattcattacttcttccacgattgtagggtcagccatacgggcaactcctccagccgcgcgaatatctgctggcacacgttctagcgccattacagcgacagctccagcttcttcagcgattttcgcttgttccgcattgatgacgtccatgatgacgccgcctttttgcatttctgccattccgcgttttacacgttcagtacctgtttgagccatttcttggtccccctaatcaaggtatagttatatgatttctaatccttattgtatcctagaaatccaataattcatatggatatatactattttattcggtttttagcgctttgaaaatcattttttattaaaaattgggttttttcagtatattacgcgaaagagccctaacatccatcagagctctttcaattgattaaaaccagccggttaccgtatcaacaatgcttccccaaattccggcaaaaaatccgccgatactgcgcattgtcaaaacaaaccagtttgctttttctacattttcttttgtaacaaggtctacgccagccagatcgctgttaaggaatccgtaatccttttcatcacctgtgtattccgcagtcagcttcccaaccttggttccttttttcacaggagcagttaagttgtctttattcagtgtgaccttcgctttgtaattcttttcttcaccatttttgacaggaagagagaacgccttgtttgtcacaatgcctacttctttctctttacccttatcaactgaaattgttttatggccttttacttgatcgccttcagcataaatttctttcatggagaaattgtcgaaagcataatcaaacattttcttcgtttcatcgaaacggcctgtatgaaggttgccctttgcgtttaaaacaacagtgatgacacgcataccgttgcgttcagctgttcctgtaaagcatgaacccgcagagtcagtagaacctgttttcagtccgtctacagtcgcttttttatactcgctgacaagccccttcagcataaaattccagttcggcatgtccatttcatcatcggtgccttctcggaatttcgttttggcgatactggaagtctccagtatctcagggtagtcagtaatcaagtgatccgcaagaatcgccatatcctttgcagaaacttcactttcttcatttacgcttgtcccctcaggctgatgcccgtgaagatctttgttttcaagacctgttgcgttaacaaatttgtaatctgttaaccctagttcttttgcttttgcattcattttttcaacaaacttagtttcagaacctgcaacgatttctgcaatcgcaatagcagcagcatttgcagaataaattgctgtagcttgatataattcttttactgtgtatttcccgtctttccgaagaggaacgtttgataagctgttatcttgggaaatttcatacacatagtcatcaggcgtataggtttggtcccatttcactttaccttgatcaattgcttccaataacagatactctgtcatcatttttgtcatactcgcaattggcagtctcttatctgcatttttactgtaaagaattttacctgaagaagcttcgatcataatagcagcagatgcattgatatcaattggatcgctggctgcttttgcttttgacattggagccagacacgtgacagctagagttaacacaaccaatgacatcagtagctgtttacatttcttgatgttcaatcgtacgacctccgtatttcattttcttcatctataattaagccgttaaggacattttcaatgcacaacagtataaattttatcataatcagtataaaaaaaatagacagagtcagagaccctgtcaaatgtttttaatttgtaacaatttattatgaaattgtatagttaggtgattcttttgtaatctgtacgtcatgcggatggctttcgcgaagtcctgcgccagtcatgcgaatgaactgagcttcttctcttagcgcacgcagatctttggacccgcaataccccataccagaacgaaggcctccgactagctgataaacggtttcttcaactggtcctttgtaaggtgtgcgtccttcaattccttcaggaacaaattttttgttttcttcttggaagtaacggtctttacttcctttttccattgcagcaactgatcccatgccgcggtataccttaaatcttctgccttgataaatctcagtttcaccagggctttctgatgtgcctgcaagcaagcttccgagcataacagcatgtccgccggctgccaacgctttagtgatatcaccagagaatttaatccccccgtcggcgatgattgttttgccgtgttttcttgcttcagtcgcgcaatcataaattgctgtaatttgcggaacaccgacaccggctacaacacgtgtagtacaaattgaaccaggtcctattccaactttgacaacgtctgctccagcttcgataagcgctcttgtcgcttcagctgttgccacgtttccagcaataatgtttaattcgggatacgtttcacgaatttttgtgactgtgtttaaaacgccttgagagtgtccgtgagctgtatctataacaatcacatcaacattggcttcaacaagctttttgacgcgagtcattgtatcgccagttacaccaactgccgcgccaacgatcaggcggccgtgaatgtctttagatgagttcgggaactcaatgactttttcaatgtctttaattgtgataagaccttttaatttattctggtcgtctacgagaggaagcttttcaattttatgtttctgcaaaatcttttcagcttcatccagagtagttcctacagatgcagtaactagctcttctttcgtcatgacgtcgctgattttcattgagtagtcagaaataaaacgaaggtcacggtttgtaataattccaacaagcttctggtcttcttcgttatttacaatcggaacaccggaaattctgtatttccccatcaaatgctccgcatcaaatacttggtgatcaggagttaaaaagaagggatttgtgataacgccgcgctcagaacgctttactttatcaacttgttcagcctgctgttcaatggacatatttttgtgaatgatgcccaagccgccctgtcttgccattgcaattgccattgctgattctgttacagtgtccatacctgcgctgatgacaggaatatttagctttaacgtttttgtaagttctacagataaatccacatcacgcggaagtacctcagactttgctggtacaagcagcacatcgtcgaacgttaagccttcttttgaaaatttactttcccacattagtaaatccccctcttttcggcaaaatattatatgtagattatcaactagccaagagcatgtcaaggaagcgggaaagagttgaaatatttagataacggaaaggatcaagaaatatacatgacatatcatgagtggaaagacttagcgctattttactccgttgaatcaacccagaaatttctagaaaaggtttataccttaaacggtattgacgatgcgaaaaaaaactcttttaaaaacagtgaacggtttatttatttcttaaagcatgccgaatcgttttataaacaagccgcatattctcccttagaaatcaaaccgattcttttattttatggaatggcacagcttatcaaagcatgcttaattacacgtgatcctcattatccaagccatacatcagtactggcacatggcgtaacaacaagaaaacgaaagaaacaaaattattgttttagcgatgatgaagtgaaaatacaacgaaatggcctatgcatacattttatgaaacatttattcggacaatcggatatagtagatgaacggtataccatgaaaaaattattaatggccattccagaacttagcgatattttctactttcatcagaaagaacgatttatgacaaaagttgagaaggataagaacgaaatttttgtaccggaggaagtagtaatcaattacaaaatgtctgattcaaggtttgctgaatacatgtcccatcattatcaatggtcttttacaaaaaaaaatgaacacgggctgctgttcgaaatttcaccacaagacaaggagccatggacatcgaccagcttattgtttgacatggaaaagaaccaatattatatcccttctcaaagggagcaatttctgaggcttcccgaaatgacaattcattatttgattttgtacaacgttgggatgattgcaaggtatgaaacagaatggtggtatgagttattaacacagcatataagtgatgactacgtgttaattcagcagtttttattagtaacagaaaagaaattccctaaatacgcttcacagtttcttcttcatttttaacaaacaaaaaaaaccgatggagatgatgttgaagaaaataggagagaaagaaggtactgaagttgattcgctgactgcccataatcgcctagaacaaatgataaagaatcaaaaagtcaccaagaaagtatatagtgaagaggatataaaaaaactacagaaaatttataaaactattgatggaataacttactgtgcctacatagatggaaatataattgtcaagatagagtgtgttgatgaatctctagaaccagatgacaatgaaagtgatatagagagatacttagaaatgggtttggagttatttagtgcagacgattgggaacgagcagcattaggatttgaccctcatacacatgaaaaactctcacttctagatcgattcaaagctggtgttaatataacgccgcctgctaaagtgatcaaatggattcgacggggaaataaactagctaaagtgtctaagaaagcagaaaaagccactgatgaagtttcgaaagttgagaaaaaggagagaacggcagagaaagttgctaaagcagagaagaaaaactctaaatcagcaagtaaagttaaattttcagaaatgacagctgatgaacaaataaaaatagctaaagaatattccaagagggctccaattagaatccctgatgcagcaaaagtaaaagctcaatcgaaaactgattatgaacaaataacttataaatggaacgatggaacatacaaatatgaggtcagatggcacacaagtacgcctggggcgcccaaaaaccaagggaatacgtgggttgtacaaaaaactgttccgggaaatggtggacaacaaccacaaaggttctttaaaatcggagaaaacgagtggattgaaggacataaatggtttgaagctattagggaaagaaaagctgggacagctactaaagaccaattaagaattttagaaaaaggtcattggaaggattgatcgagttgttaaatacaaagttttatgatggatttgaaggtgaacctgaacttgccttatctgatggagaaaacaagctcatcatgtggaatggatactttgaaactttattaaaagctttattagataacaatctagagaaagagggaattattaaagaatacttttatcaagaaggctggtatgatgactcaccttgggtaatagaagacgtacaattagcaataaaccaaatgaaaagttttgatgtaagcaaactagttgtttcagacggttttaaaaaagaattagtagaattagttcaagagattatacaatttcttgaaaatgcaaaaaacaaaactgttgttattgaatacgattaaatctagaagctgggaagccagcttctttttgaagtttgatataatttgatttgagaaaacggaaaactataatatttccaagcctaaaggtttatattaaatctatttgttattattctcaaaataatggttggaagttctcattcttgaaaaataaatttatcgacatattgtaatagaggaaaatgaaagcgttgacatcccgcaaatctagtgctaaagtatacctacaaacaaataaaacgacccgtcaggattgttactgcgaaagcaggcaaaacctaaatggtgcaggtgcaggaggagactctcgcaatctgtgtcatttaggttttttttattctcttttaggaggtgatgcagcatttgatacaaaaaaagctggtgaaaggcggccacctttcatccagcagtccccccataaaaaggaggtatacacatggattatgataaattatcgaaggacatattacaactcgtaggcggtgaagaaaacgttcagcgcgtgatccactgcatgacgaggctgcgttttaatcttcatgacaacgcgaaggcggatcgcagtcagctggagcagctgccgggggtgatgggcaccaatatcagcggcgagcagtttcaaatcattatcggaaacgatgtgccaaaggtgtatcaggcgattgtgcggcacagcaatctcagtgatgaaaagagcgttggttcatcttctcagaaaaagaatgtgctgagtgcggtctttgatgtgatttctggtgtgtttactccgattctgcctgcgattgcgggagcggggatgatcaaagggcttgttgcgctggcagttacgtttggctggatggcggagaagagccaggttcatgtcattttgacggctgtcggtgacggtgcgttctacttcctgccgctcctgctagcgatgagtgcggcgagaaaattcggaagcaatccgtacgtagcggcagccattgcggcggcgattctgcatccggatttgacagccctgctcggtgcggggaaaccggtttcctttatcgggcttcctgtaaccgctgccacttattcgtcaacggtcatcccgattttgctggcgatttggattgcttcgtacgtagaaaaatggattgaccgttttacacacgcatctctcaaattgattgtggttccgacgttgacattattgattgtcgtgccgctgacattgattacagtcggtccgcttggcgctattttaggagaatacttgtcttctggggtcaattatttgtttgatcatgcagggcttgtggcgatgattttgctggcgggtacattctctttaatcattatgacgggcatgcactatgcctttgtgccgatcatgatcaacaacatcgctcaaaacggccacgattatttactgccggctatgtttttggcgaatatggggcaggcgggagcatcatttgccgtcttccttcgctccagaaacaaaaaatttaaatcactcgcgcttaccacaagcatcacggcgctgatggggatcacagaacctgcgatgtatggcgtgaatatgcgattgaaaaagccgtttgcagccgctttgattggcggtgcagccggtggcgcgttttacggcatgacgggtgttgcttcctatatcgtcggggggaatgcaggtctcccgagcatccctgtctttatcggcccaacgtttatttacgcgataatcggccttgtgattgcgtttgcggcgggaacagcagctgcgtatttgcttggattcgaggatgtgccttctgacggcagccagcagccggcagtgcatgaaggcagcagagagatcattcacagcccgattaagggagaagtgaaagcattaagtgaagtcaaagacggagtgttttctgccgggatcatgggaaaaggattcgccattgagcctgaagaaggagaagttgtgtcgcctgttcgtggaagcgttaccaccatttttaaaacaaaacacgcaattggcattacgagtgatcagggagctgaaatacttatacacattggattggacacggtgaagctggagggacaatggttcacggctcacgtcaaagaaggcgacaaggtcgcaccgggagatccgctcgtgtcctttgatctggagcaaatcaaagccgcgggatatgacgtcattaccccggtgatcgtgaccaacacagaccaatattcattttcgccggtaaaagagatcggtaaagtgcagacaaaagaagcgctgcttgctttatcttgaaaaaactaatggggtgatcaatatgagttcaaacgcaaaacgatttccagaaggatttttatggggcggcgcagttgctgccaaccaagtggagggtgcttataacgagggtggtaaggggctttcgacagctgacgtatcgccgaacgggatcatgtctccatttgatgaatcaatgacttccttgaatctgtatcacaacgggattgacttttatcatcgttataaagaggatatcgccttatttgcagaaatgggatttaaggcgttccgcacatcgattgcgtggacgagaatttttccgaatggcgatgaagaggagcccaatgaagaaggcctcagcttttatgatgatctgtttgatgagctgttaaagcatcatattgagcctgtcgtaaccatctctcattatgaaatgccgctcggtttagtgaaaaattatggcggctggaagaatcgtaaagtcatagagttttatgaacgctatgccaaaacggttttcaaacgctatcaacacaaagtgaagtattggatgacgtttaatgaaattaacgtggtgctccatgcgccatttaccgggggcggtcttgtttttgaagaaggagaaaacaaattaaacgcgatgtaccaggcggcacaccaccaatttgtggccagtgctcttgctgtcaaagcgggtcacgacatcattcctgattcgaaaatcggctgtatgatagcggcaacgacaacctatccgatgacttctaagccggaggatgtcttcgcggcaatggagaatgagcgcaaaacacttttcttctcagatgttcaggcaagaggcgcatacccgggatatatgaaacgctatctggcagaaaacaatattgaaattgaaatggctgaaggcgatgaagagctcttgaaagaacatacggtggattatattggattcagctactacatgtcgatggcggcgagcacagatccggaagagcttgcaaaatcagggggcaacctgctgggcggagtcaaaaacccttacctcaaatcatcagaatggggctggcaaattgatccaaaaggcttgcgcatcacgctcaacaccttatacgaccgttatcagaagccgctgttcatcgttgaaaacggccttggcgctgtagacaaggttgaagaggacggcgcgattcaggacgattacagaatcaactatctgcgtgatcatttatttgaagcgcgcgaagccattgcggacggcgttgaattaatcggatacacatcatgggggccaattgaccttgtcagcgcatctactgcggaaatgaaaaaacgctacggtttcatttatgtggacagggacaatgaaggaaatggaacatttaaccgcatcaagaaaaaaagcttcaactggtatcagcaggttatcgccacaaacggagagagtctctgacaaatttttgaaaactcatgcgcttcaattgacaataacgaaatgcagacggacaataaaagagaaagatgaaccacccacagtccgaaaggcgggaagagcatgtttaacaaaatgttagtagcgattgacggatcagacatgagtgcaaaagcgcttgatgccgcagtgcatttggcaaaagagcagcaagcggaactaagcattcttcatgtggggagagaagccgtcgtcacgacttcttctctgacgggaattgtctatgtgcctgaacactttattgatgaaatcaggaacgaggttaaaaaagagggcctgaaaatccttgaaaatgcaaaagaaaaagcagccgaaaaaggcgttcaagctgaaaccgtttacgcgaatggcgagccggcgcatgagatactaaatcacgcaaaagagaaaggcgtcagcctgatcgtagtcggcagccgtggcatcagcggcctgaaagaaatgatgcttggaagcgtcagccataaagtgtctcaattatcaacatgcccggttttgattgttcgatagatttgtaaaaaaagcgcccaagggcgcttttttttatctattagaaaatgtaactaataatatatctcgatgcgcaccatctctattggcagtgccgaccggtgtaaccgcatgaaagaccttttgcccgagagcaagtgtctcaagcgggtctatcagccgcagcactttatcaatttgcttaacagacggagcaattaagttatctcctccgatagcatcttcgctcagctgaaacagatggacgaaaacaagcggttcatcgtcacgatgcagccaaatgggtgagctgtatgaaggcgcgtcaggtgtcacttgatatctgacttggtgaagcccgacgatcacttctttctcccaatctacaaaatcggtttggcgggccatttctacatttgaatgtatcatttgccgcgttacaggatgctgtagaaactcatctgatattttttcaaattgtctgacgataccgccatcatcataattatattcttttgattggaaatatccattatccggatctaattcaagagtgtcggagtgaggagccaaaatgtagcgggaatgcgctctgtaacggccgcctcctttaggatcagctttcaaagcatcatatgtaagctgtaatttgcggactgcggcgtctgtagttttttgccggtagaaatctgctgggatatacgaatagccgttttcctttaaaaaagaagcatatttagaaatatcggatgtcaactctttttgtacgtttgaaacttgaaccatatgaatctctccttaaaaagtagatgatttttttagtaatttcctgtatgatagaaaatgtggaaaatagaggatgtagtgcaatgctaaattatttgtaatatattgtcaaataataatattcagattattacaaattaccaaaatgaaaaaaggcagaatgtaaaatgatgaagaaaaagaatataatgataactggggcaaatagcggaatcggcttttcagcggtaaagcaatttttagcagaaggctttcgggttgtaggagtagatattcaaacgaataaaatgtcagaatttatagtaaacagtgacttttacatggaaaaagcagacttgtctgatgttcagcaggcggaatctttgatgccaaagctagaacaaagccaattgattccggacatcttaattaatgcagcagggataagggaaatcacccctgttcttgaattatcagcagaatcattcaaaaaagtcatagacattaatctcacggcagcctttattctttcccgagatgcggcaaggctgtggtcaaagctgggaaaacgaggctgtataatcaacatcgcctctgtgtccgggctgatggcagagcctgcgcgggctgcctatgtgtcttccaagcatgcgatcatcggactgacgaagcagctcgctatggagttcggatcaaaggggatcagggtgaatagcatttcaccgggcgtgatccaaacagaattaacggaagagtattttcaagacgatgaaatggttcagctgatcaaagataaccatgcccttcatacgtgggggcagccgagtgatatcgtttcctgtatgaagtatttggcttctgatgaggcgcactttattacaggttcaaactttgtcatagacggcggctggacggccggcaagaaactataaaaaaggaaaagcaccttgcagttggggtgcttttccctatacataattggaggtagaatacgcttgatgcagcaagatctctcaatcacaccaaaacaaaaatcaacagccgtaatcaaaatggtcatctctatggtgattttcggctccatcggctttttctcagagcataccaatctgccgtcatttgaattggtctttgtccgctgcctttgcgcgacgctgtttttaggcctttgctggctggcgtccggccagtataaaactgaaaaatggagcaagagagacgtgctgcaaacattggcgtgcggtttctttcttgtattcaactgggtgttcttatttaagtcttttgaagaaacgtccgttacaattgccatctctgtttatcatctagcgccggtgcttgttcttcttctggggagcttcttctacagagagaaattaaatgtgatctccgtcagctccattatcatctgctttcttgggactgcgctgatttccgggattaacggcagcacatcattgacacagctgatgggatcagggatcatatgggcagttctcgccgcactgttttatgcgttcaccactttattgggaaaaggcattcacaatctcagtccttacacgaccaccttcttgcagacaggtttaggggttatcatcctgattccgtttattcactttggcgcttttgcggacctatctcagggaaactggattatggtggtatctaccggcatcatccatacgggtattgtatatttgctgttttttgacagtttacgatttttatcaacgaaatttatttcaatcattgtatttctcgaccccgctgtcgcgatcgtgctcgataccgtcttcacaggcttccgccctgacctctatcaaacgcttggcatcgtaatgatctttgcgggcatggccttgacgcttgtcaggaggcaggggaaggcgaatgtgacagctgagggtacggatattgaacaaatacaataaaaaatgtaaaaaggcctatgcggcctttttttgttttaggtcaattgactctcgctaatccttaaaataagataaattttctagaaaaatattgtaatgatatttcagtctagttaagattattgagtaaatattacttttattacaaaaggagagaggaaatgaaaaaaagaaagaggcgaaactttaaaaggttcattgcagcatttttagtgttggctttaatgatttcattagtgccagccgatgtactagcaaaatctacagaagaagagaatggaaaccgtattgctgccgatgatccagaagaaactcttcagaaagaacaaactgaggaagctgtaccttttgatccaaaagatataaacaaagagggtgagatcacctctgaaagaacagaaaatacaaaactctattatgaaggtgacggtgtctataaacaggaagtataccttgatcctattcatacaaaggaaacaccggatgccgactgggaagacatttctcctgagttaaaagagtcgacaagcaaacaagtcgagacagagaacgctattttgaattcagattttcaaaagcaaatgaagaacgggctttatgcgacttttgagcataatgaccataaggttacatattcactagcagaagcgaaaggcccgaataaaacttcacttactccgaaagatacctcagcagattataagactgacagtaatgagattgtgtatccggatgtgtttccgaatattgatcttcagactttcacattcaatgaaaacataaaagaagatttagtccttcatcagtataatggatacaacacatttacatttcagttaaaaaccgatttgcaggctaaagaacaagaggatggatccattgatttttctgatgaaaaaggaaaagttgttttttctgtgcctaagccttttatgacggattcaaaactagatgagctttccggcgaggttgaacggtcagacaaagtcagctataagctggaaaagaatgaagaagggtatttgcttcatcttacggcagacgagaactggctgaaagacccagaacgcgtatatccagtatctatcgacccgtcaacttctttatctgtttcatcggatacgtttgtcatgagtgcctacccgacgacgaactattcggcctcctcacaaaaatgggatgctaatttaaaggcctatgtactgaaaacgggctattatgacaaaacaacaggcacaaactatgcgttcatgaaatttaacaacctaaagccaattcaaaatatgactgtcactaaagctacattaaaaacatacgtagcccattcctattatggaacaaaggcaaccggcctttggctggatacggtcaacagcaattatgataatgcaaaagtgacatggaacaccaaaccggcatctaaaaatatcggaaaagccgacgtccataaaggacagtgggcgagttatgatgtgaccgctgctgtaaagtcatggaactccggcggggccaactatggatttaagcttcatacaaacggaaacggcaaggaatattggaaaaaactaatttcttcagcgaactccgccaataaaccatatattgaagtgacgtataccattccaaagggaaacacacctacaatcaaagcctatcacaacggcgattccactggttatttcgatatcagctggaaaaaggttgaaggcgcaaaaggatataaggtatggatttacaatggtaaggaatatcaagcgatttctgcaggcaacgtcacgtcgtggagcacaaaaggtaaaaaaatctggcctacgagcgcagaaattgcctccaagagatataaactgcatctggacggcaaggatggagctgaattggcattagatccatccccggtctataagaattccggcggaagctatgctacaagcaaaaactattggattggcgtcagtgcgatatttgaccaaggtgaaggagcgatgtccgcaccggcaaagcccgttatccctaatgtaggaaaagcacaagcaccgtcagcaaagggctacaataatgggaatgccacaggatacttcgacctttcttggaaagctgtatccggtgcaaccggctataaggttcaggtgttcaatgggaaaggctttgagacacttgatctcggaaatcagacgtcttggaccacaaaagggaaaaagatctggccgacaagtgcagaaatcaaggcgggaaaatatgctcttcacctaaaggacggaagcggagcagagctgccgatcaatcccggaccaacctataaaaacgccgggggagatggagccaaaagaaattactcgtttaaaattatcgcatacaacaaagacggcgaagccattgcatccccggctgctaacccggcacttcctgatatcgctaggccaaagaatttaactggctatttgtatacaaatacaaaatcgagtcaaacgggttatgtgaatttgatatgggaaaaggttcaaaatgcgaagggctataaagttaacatttacaacggtaaagaatatcagtcctttgatgttggtgatgctgatcattggacaacccaaaataaaaacatctggccgacttctgaggaaatcaaagccggaagctataagcttcatacagatggaaaaggcggggaattagccctcgatccatcacctgtctataacaatgcaaatgggaattacaaagggaagaagaattattctttcacgcttgtcgcctatgatgcgaatggtgaaacgattccaacggcgccctttaacccaacgttccatgaaggcgcagaattcctaggtacagaagagtactggtctatcattgatatcccaagcggccagttaaatggtgcgacaggcaatgtcattgtgaatgaagaagatttgtcaattgacggacgcggtccgggacttggcttatcgagaacctacaacagtcttgacagctctgatcatttatttgggcaaggctggtatgctgatgcagaaacatctgtcatctcaacggatggcggggcaatgtatatcgatgaagacgctacgacacatcgattcacgaaaaaagccgatggcacgtatcaaccgccgaccggtgtatatcttgaattaacagaaacagctgatcagttcatattaaaaacaaaggatcaaaccaatgcttatttcaataaaaaaggcggcaaactccaaaaagtagtggatggccacaacaatgcaactgtctatacttacaatgacaaaaatcaactgaccgccattacagatgcatcaggccgcaagcttacatttacctatgatgaaaacggccatgtgacttccatcacaggacctaagaataagaaagtcacctactcatatgagaatgatttgctgaagaaggttacggatacagacgggactgttacaagctatgactatgatggcgaaggacgccttgtcaaacaatattcagccaacagtaccgaagcaaagcctgtctttaccgaatatcagtatagcggacaccgtctcgaaaaagcgatcaacgctaaaaaagaaacatatgtctacagctatgatgctgataaaaagacacttctcatgacacagccaaatggccggaaggtacagtatggctataatgaagcgggaaatccgattcaggtcattgatgatgcggaagggctaaaaattacaacgaatacaaaatatgaaggcaacaatgtcgtagaagatgtcgatccaaacgacgtgggcaccggaaaagcaacggaaagctatcaatatgacaaagatggcaacgttacgtcggttaaagacgcatatggaactgagacatacgaatataacaaaaacaacgatgtcacaaaaatgaaggataccgagggcaatgtcacggatattgcttatgacggactggatgctgtatccgaaaccgatcagagcggaaaatcatcgtcagcagccgtttatgataaatacggaaatcagattcaatccagcaaagatttatcagcttcaactaatattttgaaagatggaagctttgaagcacaaaaatccggctggaatctgactgcctctaaagacagcggcaaaatctcaattatcaccgataaaagcggagttctttccggatcaaaggcattggaaatcttgagtcaatcaacgtctgccggaaccgatcacgggttttcgtcagcgacacaaacagttgaactggagccgaatacaacctatacattaagcgggaaaatcaaaacagatctagcaaaaacaagagcctactttaacattgatttgcgagacaaagatcaaaaacgaattcaatggattcacaatgaatacagtgcattagccggaaaaaatgactggacaaaacggcaaatcacttttacgactccagcaaatgcaggaaaagccgttgtgtatatggaagtcgatcataatgataaagatggcaaaggaaaagcatggttcgatgaagtccagctggaaaaaggcgaagtatcgtcaagctataacccagttcaaaacagcagcttcacatcagcgacggaaaactggaatgtaagcggagcatccgttgattctgaagaaggctttaatgatgatgtatcattaaaagctgcccggaccagtgcgtcccaagccggatcagtaacaaaacaaaccgttgtcttagggcaaagcgcaaatgacaaaccggtttatctcacactgacaggaatgtcgaaagcaagcagcgtcaaatttacagatgaaaaagactattctctgcaggcgaatgtcacttacgctgacggcagcacaggcgtctacaatgcgaaattcccttctggaacacaggaatggaaccgggcagctgtcgtcatccctaaaacaaagccgatcaataaagtagatattagtattctgttccaaaagagtgcgacaggcacagtctggtttgatgatatccgtttgattgaaggaagccttctgactaaaagcacgtatgacagtaatggcaactatgtgaccaaggaagaggacgaactaggttacgccacttcaactgattacgatgaaactggtaagaaaacagctgaaacggatgcaaaaggtgaaaaaacaacctatacgtatgatcaggcagaccaactgacaaacatgacgctctctaacggcacgtctatccttcacagctatgataaggaaggcaatgaggtaagcaaaaccatccgggcgggagcagatcaaacctataaatacgaatatgatgtgatgggcaagcttgtcaaaacaactgaccctctgggcaatgtgctagcaagcgaatatgatgccaacagcaacctgaccaaaaccatttcaccaaatggcaacgaagtgtctctttcttatgatggaacagaccgggtgaaatcaaagtcgtataacggtacagaaaagtacaatttcacgtatgacaaaaatggaaatgaaacgtcggtcgttaataaagagcagaacaccacaaagaaacggacatttgacaacaaaaaccgtttaaccgaattgactgaccgcggcggcagccaaacttggacataccctagtgactccgataagctgaaaaccttctcgtggactcatggggaccaaaaaggaacgaatcaatttacgtataacaagctggaccaaatgattgagatgaaagacagtacatcttcatattcatttgattatgatgaaaatggaaacgtccaaacctttattacgggcaacggcggcggaacaagtttttcatatgacgaaagaaaccttgtaagctcgctgcatatcggtgacaaaaacggcggaagcattctgacggaaagctatgaatatgatgccaacggcaatcgcacaacgataaacagctcagcaagcggcaaggtgaaatatgagtatgggaagctgaatcagcttgtcaaagaaacccatgaagacggtactgtcattgaatacacatatgatggattcgggaaccggaaaaccgttacaactgtaaaagacggctcaagcaaaacggtgaacgcttccttcaacatcatgaaccagctgacaaaagtcaatgatgaaagcatctcttacgataaaaacggcaaccgcacatccgacggcaaattcacatatacgtgggatgcagaagataacctgaccgccgttaccaaaaaaggcgaagacaagccattcgcaacatataagtatgacgaaaaaggaaacagaatccaaaaaaccgtcaacggaaaagtcacgaactacttctacgacggagacagcttgaacgtcttgtatgaaacagacgcggacaacaacgtcacaaaatcatacacgtacggggacagcggccagctgttatcctacacagatccgcaacagcctttagtagccgcagaacgtattcgctccatttttcagctgtttcttttgcgaacagatctgtcgcatattcgagctgcaagccaatgccattttcatcagtaaatccgcccagtgtcagatcaaacttagaggttccctgatgagcctcataaggtgaaatgctcagattttgcaatgtaagctgttctttatcagggttttctgtcgtcaccatcacattaaacaatgggtttcggctcatatcccgagggagatcaagctgattaaccagatcttcaaacggatactcctgatgctcaagcgctgacaggttcgtctgctttgcttgctccaaaagctccgcaaatgtttgctgttctttcgcttccattctcagggcaagtgtattgacgaacattcccggcatgtcctgaacatcagcattcgtccggccggcagtaacggagccgatgacgatatcccgctgtccggaaattttgcttaaaaagacgtggaaaacagcatggagcaccatgtgcaaggtcgttccggtttccgcaagcagtttttctaccgcctttgccgtctcacttcccgtacggaaacggatcgtatctcctttaaagctttgcacaggcggacgggcgtaatcgagcgggagatcaagctctggcagctcgcctgaaagaactgacatccagtacgcctcatgctccttcatccgttctttttgctcagcttcatgttgccaaacggcgaaatctttataatgaagcgccggctccggaagctgctctcctttgtaaagcagcgccaattcttttacaaaaatgcctcttgagacgccgtctgcgatgatatgatgcatatctaaaagcagcaaatgttttttcgcttctattcgaagcaaagctgcgcgaatgagcggtgcgtcggttaagtcgaatggccggataaattccttaatcttttggtccgcttcgtcttctttggcttcaaacagatgaagatcaacctccgcctcctcaatgatgcgctgaacaggctcaccattagcttccataaatgacgtccgcaatgattcgtgacggttcacaagctgattgagtgagtcgcgcaggcacgaaatatcaagctctccttccattagaagaacagatggcatgttgtagcttatcgtctggcggtcaagctgattgagcacgtacatccgtttctgtgcggatgacactggatacatatcctgcttgtcagccggtttgaggacttgatggccgcctgaaacagcagacgcctccatataagccgccagctggcgaacagtcggctgctcgaacagtgctttaagcggtacgcttttctccaattccgcctgaatgttggcaatcagcatcatcccttttaatgaatggccgcctaaatcgaaaaaattgtcgtcaatgccgatggcttctatgccaagcgttttctgccaaatgcggcataagctttcttcaagcgctgtctccggtgcggccaatgccttgcctccggattgtgccgcgttcggctttggcaaagcgtttctgtcggtttttccgtttgccgtcagcggaatcgcgtcaacctgcacaaagaaagcaggaatcatatgagacggcagtgttagggaaagctgcttccggagctctgctttttcaatagcttgatccgacgtataatacgcgcaaagctcttgaagaccgccctcggaaaccgctagtacaaccgcttcttgaattccgctgaggctgagcatgaccgtttcaatttctttcggctcaatgcggtagcctcggattttcacctgatcatcagcccggccgataaatgcaagcgtaccgtcagaaagtcttcgtacgacatctccggttttgtacatgaggcttcccggcgaatatggattttctacaaatctctcggctgtcagctgaggcctgttgagataccctctcgcaagcccctgtcccgtgatatagagctgtccgctcgctcccggcggcacaagcttcaatgcttcatttaagacaagcgcgccggcattcgtaatcggccgtccgattgtcgggcgtttcgcaaatgcatccggctcagacagatcaacccgcccggcgatggcgccgatcgttgcttctgtcgggccgtagtgattgataaattcggtatgtccatacatcttacggaaggcgagaacatcagtcgggatgattttttctcctcccaagacgatcaagcgcaaggattcaaagtttgcatcttttgcaaaactggcggtgttcactattgtatggaacagagacggtgtcagtttgatataagtgatcccatgctccttgatatagtgcgctatttcatccggcgccgtataggtttccttctggacgatatggagctcgcccccgcccagaagtacagggaacatgctcgtatagccaaggtcaaatgcgtaagatgaaagcaatacagtcttatcattttccgtcaggctcgcctcttcactaaaccaagagacatagtttgtcagattgcgatgctcaatctgcacgccctttggctttccggtcgtaccggacgtataaatgacgtatgcaagattgcgagacccggaaatggatgatgggcgctccttgctttcatttctccatttaccgtcatcaaggctgacgattgtcccttcatattgcccaatagccgtcatgtttctttcattcacgaccgcaaattttgcaccgctgtcctctaatgaataacggattcgttcttcgggtgtatcaggatcaatcggaaggaaagctgcccccgccttcatgacaccgagaatcgataccatgacttcagctgaccggtccataacaatcgcgacaatgtcttcatttcctgccccttgggcacgaagatgatgcgccagctggttcgcctgttcatcaagctcgcgataggtcagcagatttccgccagccttcaccgcaggatggtcaggtgtttgctgggcctgtttttcaaaaagagcggcaaaggttgcttcggtaatttgagtcatatgtctttcttctagcaaagcagctgtttctgcagatgaaagcagatctacatcagacagccgaacgtttggattagccgcggccgctttgatgatattgacaaagtggcggctccagcggcggatcgtctcgtccttaaacaaggcagtcgcatagtcaaagcttaggccgatatcctcttcacgctcgaccgcttccaaggaaagatcaaatttcgcaacatgatgaagcatggaatacgaggaaatcttcaaatctcctaatcttaatgaaggaatctccatattttgcatgttgaacatcacgctgaacagcggacttctgcttgtatcccttgtaagcggaagcttttcaatcagctcctcaagcggatagctctggtgctcgaacgcttgaaggctggctgttttgacctcttcaaggaattgcgcgaaggttttatctcccgctggtgccgttctgagtgccaccgtgttgacaaacatacccggcacaccttgcagatcaggatgtgttctgccagctgtcggcgagccgacaatgatatcatcctgtgacgcgtacttggaaaggagtacattgaacgccgccagcaaaaacatgtatatcgtcgtatctgtttctgccatgagcgatttgatttgagccgtgatttgcttatcaagcccaaacatcacgcgttctcccgcaaagctccgttcagctggccgctcgaaatccgcgggaagatccagtattggcagttcgcctttaaagacatcgagccagtattcctcatctttttgataattagtttgttctttgtgccaaactgcgtaatctttatagtgaatttgtggcagttccagatctgcgccttgatatattttggcaagatcaccgattagaatgcctgttgaacttccgtcagtaataatatgatgcatatcaatgagcagcagatggcgtttttcttccagctggacaagcttcgaacggacgagcggcgcgcggtttaattcaaacggctgaacaaatgctttgattatctcttccgcgtcttcttcccgtcccttggcagcctccagctggaacgatatgtttttatgaacggtttgcacaacctctccgtcgatcatgtcaaacgatgtacggaggatttcgtgccggttgattaactgctgaatcgcgttttcaagccggtctttatctacttctccctccagcagaagtacagcggggacgttgtagcttgtgtttgcttgtccaagctgattgaggatatacattctccgctgggccggggatacaggataatgctgctgataagatgcttgcctgatcggttcaaacgtctgctcctccttgctttcgttctcttccaaatacagtgccagttcttgaatagtcggcttttcaaaaagcacttttatcggaacttccttatgaaaatgctcttgaattttcgccgtcatcatcatcgctttcaaagaatgaccgccgatcataaagaagttatcggtaacgcctgctctgacgccgagtattccttcccagatctccgctaatttcttttcactctctgtttctggtgctgcgtattccggctgcacggcttctgattgcggtgcaggcagttcttttttattgattttcccgtttggcgtgagcggcaggctgtccatttgaatcaggtgggcagggaccatatagtcaggcaaagactgagacagtgtttttctcagctcactcacagccacttcacgatccgccgtgaagtacgcgcaaatttcattttcatctgctttgttcttgcggatgatcaccgcagcctctgtcacatgctcagccatgttcagttttgtttcaatttcgccaagctcaattcggaagccgcgcaccttcacttggttgtcgattctgcctaaaaattcaatattgccgtccggcagccatcttgccaagtcaccagtgcgataaattctctcacccggtctgaacggatcttcgagaaattgcttctctgtcagctcagggagattgacatacccacgcgctacaccgattccgcctacgcaaagctcaccaggcgcgccgattggctgcaggcattgctgctcatccaggatgtaggcagtggaatttccgataggcttcccgattgggatagagcccccatactcacggtcgatcagaaaactggttgaaaacgtcgtgttttctgtcgggccgtatccgttccacaatgaaagcgacggcgatgcctgttttactttgctgacaatatgcgggacaagggcatctccgccgatgattaaatggcgcagtgtgccgaacatacccgcatcctttgcagcaagctggttgaataaaggtgatgtcagccacatcgtcgagattctttgctcacgcagaaatgcagcaaattgtttcgcatcaagcagtgtctcttttttgaccggataaagcgctgcgccatttagcagtgcgccgaacacttcaaacgttccggcatcaaagctgactgcccctgtttgcgccatgcggtcctcttcagtaacaggaacgtacccggcatttttgacgaggcgcagaatgcttttatgttcgatcatgacgcctttcggtttgcccgttgaaccggatgtgtacatgatgtacgccaaatcagacggggcggatggcaggttgagattgtcagccgcttcgctctcttcaaagcctatgtccagtgtaagaaccggcacttgcagctgatgtgcctgccctgtataagaatttccggtcaaaaccattcgaacggagctgtcctctgccatgaaacgaagacgagccccaggaagcgctggatcaagcggcacatatgcggcacctgcttttaacacagccagcatgccgacaacggtttctactgagcgatcgttcataatcgctgctgtttcccctttttgaagcccttgttcgacaagctttctcgccagacggttagccgttgcattcagctcgcggtacgtcagctcggttccttcatatacgacggcggtgctcgccggcgtccgtttcgcttgctcttcaaacacttggtgtacagccattccttcagggagttcggctttcgtgctgttaaacacctcgacaatttgccgctgctcttcgtttccaacaagcccgtactcacgcacaaaagcggccggctgagcgacagctgcttccatcatgcgggtaaggtgctccgctgtccgttcgataaaagcggaatcaaaggcggctccgttatatttaattttgacggtccacgttttgcccggatacacaatcaggttgaaatcgaagctcgtttgttcaaatgcgctttctaccttaatcgaaaacccgaggcggtcttccatgctgccgttttcaagctcttgatcaagcggataattttcaaacgcgacaagatggtttaagagattgccatcaagagctgagcgtttttgaatctcatagagcggcacgtaatcgtaacgctctgcctctactgcatgctgctgaacagctgtgaaaatatcagcgaatgcagcatctcgttcaactttcacccgcactggaatggtgttgataaacagccccgccatcgtttcgattccgttgatttcagacggtcgtcccgagacgaccgttccgaagatcacatcatccgtaaagttgtatttgctgagaacaatgccccaaacggcctgaaataggttaggccctgtcacttgatggagatttgcggtttgctgaatacgggcaaccagtgtttcgtcccatgtaaatgaatattctttattgacgtattcgtcttttttcacaggcaggcggcccgggagcacgctgggctgttcaaaacccgccaagcgctcgctccagtagctctccgcttcttcattgtcctgttttccaagccacttgatgtaatcggaataaggcttgccctgaccgtttgccggtgtcctgcctgctctgagcgcttcatagttttggaacaggcttttcatgaggacgcccatgctccagccgtccatcataatatgatgattgctccagacaagatacagctgatctgcagcaaggcggaaaaccgccaccttgaacaatatgtcttttgccaggttaaagccttggcgctgaacgtcttgtttgtaacgctcaatgtgctccttctggcgattctcgtctgcatgactgatatcctcataatgcacctttgttttgcgttccgctaacacgacctgacgcggtttttgcagctgctgatgcacaaataccgtacggagaatatcgtatgaccgaatcagttcattgacgcttttctcaaagatttcaagatcaaaagcgccgtgaatcccaagctctaattgtgtgaagtacgaggaagaatgcggatcaagcatcgcatgatacagcattccctcctgcattggtgtcagtgcgtacaccttttgaatcgattttttgctcatatgccacctctattagaaaatttccattaatttatccagctcatccagcgtcaaatcgtcgtcaccaagatcactcggggtcagttccgtaccgtcttgagataggcaatgttcaatgattctgagaagatgcgctttaaagctgtcactgaatgtttgtactgttttttcatgaaattcaagagaatgataggccagtgacatcgtcagttttccgttttcgatatatccgacaacatccagcgcattcggtttttctgtttcagggcttaatgactgtcctgacggcagctctgatctcgtaaacaaacctgcatccgacatttcgtcaaactgacctaaatagttgaagctgacatccggctgaatcgagaacgccacatcttctttatgttcgggcgctgtcaaatagcgcagaatgccgtatccgactcccttattcggcacatgtctgatatcttctttcatttgcttcagctggtagcccagatcatccgcatgcttcatatcgagcaccattgggtacatacttgtaaaccagccgactgtgcgggaaatggtcaggtcttctatgatttcttcacgtccatgcccctctaaatgaacacttactcgatcttgacccgtccactccttcattgccaatccgaatgccgtcagcaaaatatcattcatttctgtgtgatatgcctcgtgcacctttgtggtgagctgttctgtctcttcagcagtcagcgagaattcaattgtctttgtatgtttcattcgctgatcaccagattcgcggtctttcggaagctttgctgcgactgcttgttcttcaagctgtctccaatactctttttctttcaaaaaggctttggagttcgcgaagtcttgcaatctctctgcatactctgcaaatgaatgtgttttatgcgggagaaccggttcattgccttgctcaagctgtgtatatactgcggcgaaatcctccagtaaaatccgccacgacacgccgtcaaccactaaatggtgaatggcaagaagcaagtggtctccgtcttccgcttggaacaagcttgcttttaacaagccgccttcctgcaagtcgatgctgctttgtaaacgctccgcttctctctctatacggtcttcgtaatctgcagcttggccctcaatctggatgacctccaaatgagctgaagcagcttcaagacctttgttgtattgaatgacgtcttccagtccctcacggtagaccatacatcattcaaaaatatggttaagtcctcgatcgattagtatctgtcagctccatgtgtcgccacacttccacctcagacctatcaacctgatcatctttcagggatcttacttccttgcggaatgggaaatctcatcttgaggggggcttcatgcttagatgctttcagcacttatcccgtccgcacatagctacccagcgatgcccttggcagaacaactggtacaccagcggtgcgtccatcccggtcctctcgtactaaggacagctcctctcaaatttcctgcgcccgcgacggatagggaccgaactgtctcacgacgttctgaacccagctcgcgtaccgctttaatgggcgaacagcccaacccttgggaccgactacagccccaggatgcgatgagccgacatcgaggtgccaaacctccccgtcgatgtggactcttgggggagataagcctgttatccccggggtagcttttatccgttgagcgatggcccttccatgcggaaccaccggatcactaagcccgactttcgtccctgctcgacttgtaggtctcgcagtcaagctcccttgtgcctttacactctgcgaatgatttccaaccattctgagggaacctttgggcgcctccgttaccttttaggaggcgaccgccccagtcaaactgcccacctgacactgtctccccgcccgataagggcggcgggttagaaggtcaatacagccagggtagtatcccaccgatgcctccaccgaagctggcgctccggtttccaaggctcctacctatcctgtacaagctgtaccaacattcaatatcaggctgcagtaaagctccacggggtctttccgtcctgtcgcgggtaacctgcatcttcacaggtactataatttcaccgagtctctcgttgagacagtgcccagatcgttgcgcctttcgtgcgggtcggaacttacccgacaaggaatttcgctaccttaggaccgttatagttacggccgccgtttactggggcttcaattcgcaccttcgcttacgctaagcgctcctcttaaccttccagcaccgggcaggcgtcagcccctatacttcgccttacggcttcgcagagacctgtgtttttgctaaacagtcgcctgggcctattcactgcggctctctcgggcttgcaccctaacagagcaccccttctcccgaagttacggggtcattttgccgagttccttaacgagagttctctcgatcaccttaggattctctcctcgcctacctgtgtcggtttgcggtacgggcacctctcacctcgctagaggcttttcttggcagtgtggaatcaggaacttcgctactatatttcgctcgccatcacagctcagccttatgggaaacggatttgcctatttcccagcctaactgcttggacgcggatatccaataccgcgcttaccctatcctcctgcgtccccccattgctcaaatggtgaggaggtggtacaggaatatcaacctgttgtccatcgcctacgcctttcggcctcggcttaggtcccgactaaccctgagcggacgagccttcctcaggaaaccttaggcattcggtggaggggattctcacccctctttcgctactcataccggcattctcacttctaagcgctccaccagtccttccggtctggcttcacagcccttagaacgctctcctaccactgttcgaagaacagtccgcagcttcggtgatacgtttagccccggtacattttcggcgcagagtcactcgaccagtgagctattacgcactctttaaatggtggctgcttctaagccaacatcctggttgtctaagcaactccacatccttttccacttaacgtatactttgggaccttagctggcggtctgggctgtttccctttcgactacggatcttatcactcgcagtctgactcccaaggataagtcattggcattcggagtttgactgaattcggtaacccggtaggggcccctagtccaatcagtgctctacctccaagactcttaccttgaggctagccctaaagctatttcggagagaaccagctatctccaggttcgattggcatttcacccctacccacacctcatccccgcacttttcaacgtgcgtgggttcgggcctccattcagtgttacctgaacttcaccctggacatgggtagatcacctggtttcgggtctacgaccacgtactcatgcgccctattcagactcgctttcgctgcggctccgcatcttctgcttaaccttgcacgggatcgtaactcgccggttcattctacaaaaggcacgccatcacccgttaacgggctctgactacttgtaggcacacggtttcaggatctctttcactccccttccggggtgcttttcacctttccctcacggtactggttcactatcggtcactagggagtatttagccttgggagatggtcctcccggattccgacggaatttcacgtgttccgccgtactcaggatccactcaggagagaacgaagttttgactacagggctgttacctcctatggcgggcctttccagacctcttcatctacctcgttcctttgtaactccgtacagagtgtcctacaaccccaagaggcaagcctcttggtttgggctaatcccgtttcgctcgccgctactcagggaatcgcatttgctttctcttcctccgggtacttagatgtttcagttccccgggtctgccttctcatatcctatgaattcagatatggataccactccattacgagtggtgggtttccccattcggaaatctccggatcaaagcttgcttacagctccccgaagcatatcggtgttcgtcccgtccttcatcggctcctagtgccaaggcatccaccgtgcgccctttctaacttaaccgttaaaaagaatccgatggagatgatgctgaagaagctagagaaacataagcagtccaacgttgattctgtgatgatagatgacaaacaacagaagatcgagcgcgagattcatgctgaagatagtaacttaacggtattacagaaagaagcagcagcccacccgaaagtctatggagacatacgggtgataaatgataaaatatataatcataaaggattaaaaaagatagatacgatagaagtgattgacgaactaactcgtgatactgcaagcatcgactacgtcggcggcaaatattatgtatatgaaaacggccaaattgtgagagaactctacgctggagggaaaaagcggctagaagaagtgtcttacattccagaggataaagtaggcggagctaagccaattgattcgtttcttgccggaactcaatatgaatttattgagtgggtaagccctcagggtgctgttaaaaaattggcggtccgaggcgggaagcgtgttgtcacagatgttgctaaacatgtagtggagaaggatataaagggagacgtaaaaaagaaaccttctaaaggcagtgttaatagtaagtggtggcatcctggatatgtagataatttaagctcttcccaaacggttataggaataaagaattcccctaaaggtttatcaactcttggtagctcaacacgtcagaatgcactagatgcaggaaaaggctgggttggtcaaggagcggaaaaaatgtatgataaagcaggaaattttttagggtacaaaagtgtagataaaatgagagctttcagattgcaatataaaccaaaggaaaaaatgtggagagcgaacttcactgaaaatgaaattactgttgtaggatcaaaaacggaattaagaaatgtacatgttgatattttagattaaaaggtgggatataattatgttagaaattaaagctttaactaaagactatgaaaattggggtgaggatgctgatgatttctacgtttcatttgaacttgacgtaggattgcctgatataccaggtgcttctgatttatttacttttaatattattagtcctaaaagattggataagatacttgaaagtacaaaaattgaattaggtcatggatatctcataatgagagattttaatataaaaactgtcaattctactgtagagactatcatgaataaatgtaaagacgatgactatgataagtatatgaataatttagctcaatactttaaattacaaggataacaccaaaagagttgttggctagtcgcttatagttatactaaaagaatatgaatatatcggaactgtaatcaatttcgaatttaatatacatgttatatgataaacaactagaggtttttcatgttagaagatattcctggttataaaaatctcacgtcataactattttaattaaatggttttcaggaccctctggtttgcttcctagtgagtagctttagaagtgtagtggtaactgttttaccttgattggcaaagtgcctttcaaggttttttaataaaaataatcttttatagctaattcataaaccctttcaccttttctttggcatgtttatcgacgaatacaaaaaagtgctgaaacaaacacagcatgcgatttcctctgtagaatctgactcccatggcatgattgcagaggcttttctctcacacgatgcgagacatggggtcaagcatgcacgagaagtgacagagcagctcactgacgcagtgaatcgccagacatcagccatcggcttgctccctgatgttagcggcggacgggtgagtaacacgtgggtaacctgcctgtaagactgggataactccgggaaaccggggctaataccggatggttgtttgaaccgcatggttcaaacataaaaggtggcttcggctaccacttacagatggacccgcggcgcattagctagttggtgaggtaacggctcaccaaggcgacgatgcgtagccgacctgagagggtgatcggccacactgggactgagacacggcccagactcctacgggaggcagcagtagggaatcttccgcaatggacgaaagtctgacggagcaacgccgcgtgagtgatgaaggttttcggatcgtaaagctctgttgttagggaagaacaagtaccgttcgaatagggcggtaccttgacggtacctaaccagaaagccacggctaactacgtgccagcagccgcggtaatacgtaggtggcaagcgttgtccggaattattgggcgtaaagggctcgcaggcggtttcttaagtctgatgtgaaagcccccggctcaaccggggagggtcattggaaactggggaacttgagtgcagaagaggagagtggaattccacgtgtagcggtgaaatgcgtagagatgtggaggaacaccagtggcgaaggcgactctctggtctgtaactgacgctgaggagcgaaagcgtggggagcgaacaggattagataccctggtagtccacgccgtaaacgatgagtgctaagtgttagggggtttccgccccttagtgctgcagctaacgcattaagcactccgcctggggagtacggtcgcaagactgaaactcaaaggaattgacgggggcccgcacaagcggtggagcatgtggtttaattcgaagcaacgcgaagaaccttaccaggtcttgacatcctctgacaatcctagagataggacgtccccttcgggggcagagtgacaggtggtgcatggttgtcgtcagctcgtgtcgtgagatgttgggttaagtcccgcaacgagcgcaacccttgatcttagttgccagcattcagttgggcactctaaggtgactgccggtgacaaaccggaggaaggtggggatgacgtcaaatcatcatgccccttatgacctgggctacacacgtgctacaatggacagaacaaagggcagcgaaaccgcgaggttaagccaatcccacaaatctgttctcagttcggatcgcagtctgcaactcgactgcgtgaagctggaatcgctagtaatcgcggatcagcatgccgcggtgaatacgttcccgggccttgtacacaccgcccgtcacaccacgagagtttgtaacacccgaagtcggtgaggtaaccttttaggagccagccgccgaaggtgggacagatgattggggtgaagtcgtaacaaggtagccgtatcggaaggtgcggctggatcacctcctttctaaggatattatacggaatataagaccttgggtcttataaacagaacgttccctgtcttgtttagttttgaaggaagattcactagatcaaaacggatatacctatggaaacaacaacccggtcatgaatgtcgatccagacggccattgggtatggtttgttgtcaatgcaggatttgcggtatatgatggatacaaagcttataaatcaggcaagggttggaaaggcgtagcggttgcagccgcatcaggatttgtaggtggtggaaagttaaaattaacaaaaaaaatcggaaaatgggccacctcaagacattggtataaaggaacatttaaaactaaaagaaagtcattggactatcatcataataaacatattgtgagaaatggtaaatcttacagtaaaaagagatatacaaaagttgctagagcattttatagatctaataagcatttacgcgaaaaagtaatactagctactggaaaaaaaggttacaggattaagaatggaaaaagaactggttattacacaagaagtggaaaggtagttacatttgtgaataataaatggaagaaaaagaaaaagcgttaattttaatttctacaatatagaagggcctgaatatggatgaaattttttaaaagatataatattgatcaaaaaacattagatgagttcaaaaaatattatgtattattacatggtccgtttccaaatgatatgtatgattttgaagaagaaacaaatacttctttagatgaattttatgaattttttgccttaataactggaagtttaaattatataattgaagataaaaaaattcctagatatcaaagagaaatgttaaaaaaaacgttctatgaacattatcctcattttaggaattataaaaatgatattttaaaatatcaagaattaagtgaatgcttagaatttcatgaaaaaattaggattttgattaataagcttataacaggaggatgaatctttaaactaaaataataaacaaaaacagctgtcaagtatatttgacagctgttttaattaattcgggaaagacacaatttatttttacagcgacagtctgaatgtgtatactttcacaaaagcatacacatacggtgatagtggacaactgctagcattcacgccgctttgttaaagcaactttattagtatacaacgtcacttcttcaaagtcaacaactttttttaaaaaaacttttggtggagcctagcgggatcgaaccgctgacctcctgcgtgcaaagcaggcgctctcccagctgagctaaggccccataaaaaatggtcgggaagacaggattcgaacctgcgaccccatggtcccaaaccatgtgctctaccaagctgagctacttcccgattccctatctattctattaaaagatatggcgcgcccgagaggagtcgaacccctaaccttttgatccgtagtcaaacgctctatccaattgagctacgggcgcaattcaatttacaatatcccgttaggataaatggagcggaagacgggattcgaacccgcgacccccaccttggcaaggtggtgttctaccactgaactacttccgcatatcgcaataaaaaaagctttctccttatgagaaaccttggtaataatacatttaataaagcttccaagcgggctcgaaccgctgacctcttccttaccatggaagtgctctacctgctgagctatggaagcaatggctccgcaggtaggattcgaacctacgaccgatcggttaacagccgatagctctaccactgagctactgcggaataatataaagcttcataaacaaacatggtagaattaataaactgcttggcggcgtcctactctcacagggggagcgtgccagtccgcgccccgccacgcaaagctctccggctacgccttccggctgcacctgattgccctcgccgagaatgtatactctcgtattggcaatggcccttccgatggaaagcgagccttcctccggatggatttctgcgcttgtggcaacgaccgtattctctgtcggcccgtagttgttgacgagtgtgtacggctttttcactgcccgcttcagcttgtctcctccagtaagcaatacgcgaagtgatgtgttctcaagctccatgaactgttccgcaagctgtgtcggcaggaacgtgatcgttatgccgttcgtttcaaaataatcgttcaggcggacgatatcgaggcggatcgcttcatcaatgacgtgaagctcggcaccgatcgtccaggtcgggaacatctcccaaatggaagcgtcgaacccaaagcccgcgtacttcgcactgcggtcctccgctgtcatgctgaacgcgtcatggtgccagaagcacaggttcacaagcgcatggtgctcgaccatgacacccttcggctgtccggtcgttccagacgtgtaaatcatgtacgccaagttctccgcggttacagcggtttctggatttccctcgtcgttttcatcaagcggcaggcttagaatcgtgcggcttccgtcgagaagaatgacatctcccgtaaagctgtccggcactgaaatgccttcctgtttcaagagatcgtgccagtccgcgccccgccacgcaaagctctccggctacgccttccggctgcacctgattgccctcgccgagaatgtatactctcgtattggcaatggcccgtccgatggaaagcgagccttcctccggatggatttctgcgcttgtggcaacgaccgtgttttctgtcggtccgtagttgttgacgagtgtgtacggctttttcactgcgcgcttcagcttgtctcctccggtcaagaggacgcgaagtgatgtgttctcaagctccatgaactgttccgcaagctgtgtcggcaggaacgtgatcgttacgccgttcgtttcgaagtaattgttcaggcggacaatatcgaggcggatcgcttcatcaatgacgtgaagctcagcgccgatcgtccaagtcgggaacatctcccaaatggaagcgtcgaatccaaagcccgcgtacttcgcactgcggtcctccgctgtcatgctgaacgcgtcgtggtgccagaagcacaggttcacaagcgcatggtgctcgaccatgacacccttcggctgtccggtcgttccagacgtgtaaatcatgtacgccaagttctccgcggttacagccgtctctggatttccctcgtcgttttcatcaagcggcaggcttagaatcgtgcggcttccgtcgagaagaatgacatctcccgtatagctgtccggcactgaaatgccttcctgtttcaagagggaaatttggttgcgggggcaggatttgaacctgcgaccttcgggttatgagcccgacgagctaccgaactgctccaccccgcgatgatataatggtggaggatgacgggctcgaaccgccgaccctctgcttgtaaggcagatgctctcccagctgagctaatcctccatcatataatgacccgtacgggattcgaacccgtgttaccgccgtgaaagggcggtgtcttaaccgcttgaccaacgggcccagactttcaattgtaattatgtataagtatcagtggcggagagcaagggattcgaacccttgagacggagttgaccgcctacacgatttccaatcgtgctccttcgaccactcggacagctctccaataatggctccgcaggtaggattcgaacctacgaccgatcggttaacagccgatagctctaccactgagctactgcggaatgaagtctgcctggcgatgtcctactctcacagggggaaacccccgactaccatcggcgctgaagagcttaacttccgtgttcggcatgggaacgggtgtgacctcttcgccatcatcaccagacaatttcagtgacatttaacattatactatgtattcttgagaaaatcaagtgtttttttgaaaaaacttattctctcaaaactagataacaggtgtgcaaaatttggttgcgggggcaggatttgaacctgcgaccttcgggttatgagcccgacgagctaccgaactgctccaccccgcgatgattaggaatatgtatggcggaggaagagggattcgaacccccgcgggctttgacacccctgtcggttttcaagaccgatcccttcagccagacttgggtattcctccgtatagtggtggaccttgtaggactcgaacctacgaccggacggttatgagccgtctgctctaaccaactgagctaaaggtccattggtagcggcggaggggatcgaacccccgacctcacgggtatgaaccgtacgctctagccagctgagctacaccgccaaatattttttgaaatcaagtggagcctagcgggatcgaaccgctgacctcctgcgtgcaaagcaggcgctctcccagctgagctaaggccccaagaatggtcgggaagacaggattcgaacctgcgaccccatggtcccaaaccatgtgctctaccaagctgagctacttcccgatttcatatagatcatggcgcgcccgagaggagtcgaacccctaaccttttgatccgtagtcaaacgctctatccaattgagctacgggcgcaacactttcagaaattgaagtccagctcgcccagctttctgcggtgcaggatgcggcggtgacagctgtcaaagataaaggcggcaacacagcgatcgcggcgtatgtcacaccggaaacagctgacatagaagcactgaaatcagcactgaaggaaaccctgccggattacatgatcccggcgttctgggtgacgctggacgagcttccggttacggcaaacggcaaggtggaccgcaaagcgttgcctgagccggacatcgaagcgggaagcggagaatacaaagcgccgacgactgacatggaagagctgcttgccggcatctggcaggacgtgcttggaatacctgaagtcggtgtcaccgacaatttcttctcgcttggcggagattccatcaaaggaattcaaatggcgagccgcttgaatcagcacggctggaagctggaaatgaaagatctcttccagcatccgacgatcgaagagcttacccaatatgtagagcgtgccgaaggcaaacaggcagaccaaggcctcagaaattgaagtccagctcgcacagctttctgaggtgcaggatgcggcggtgacagctgtcaaagataaaggaggcaacacagcgatcgcggcgtatgtcacaccggaaacagctgacatagaagcactgaaatcagcactaaaggaaaccctgccggattacatgatcccggcgttctgggtgacgctggacgagcttccggttacggcaaacggcaaagtggaccgtaaagccttgcctgagccggacatcgaagcgggaagcggagaatacaaagcgcctacgaccgacatggaagagctgcttgccggcatctggcaggacgtgcttggaatgtctgaagtcggtgtcaccgacaatttcttctcgcttggcggagattccatcaaaggaattcaaatggcgagccgcttgaaccagcacggctggaagctggaaatgaaagatctcttccagcacccgacgatcgaagagctcacccagtacgtagagcgtgccgaaggcaaacaggcagaccaaggtaacccgaaccagccgctttccagcctgtcactggtcaccgagacagaaaagcaagcgcttcttgaggcatggaagggtaaagcgctgcctgtgccgacagacaaaacggttcatcagctattcgaagagactgtccagcgccacaaagaccgcccggctgtcacatacaacggccagtcttggacgtacggcgagctgaatgcgaaggcaaaccgtcttgcacggattttgatggactgcggcatcagcccggatgaccgcgtcggcgttctcacgaagccgtcgcttgaaatgtccgccgcggtgctcggcgtcttgaaagccggagcggcgtttgtgccgattgatcctgactacccggatcagcggattgagtatattttacaggacagcggcgcgaagctaatggtgcggatgaagggacttgaacccccacgtctgtaaagacactagagcctgattctagcgcgtctgccaattccgccacatccgcaacatgtaaatggtgagccatgaaggactcgaaccttcgaccctctgattaaaagtcagatgctctaccaactgagctaatggctcttcttacaagagacttgaatattatatcatataaaagtggtgccggcaagaggacttgaacccccaacctactgattacaagtcagttgctctaccaattgagctacaccggcatatatgtaaaaccgatatgtataatgaaaaatggtggaggatgacgggctcgaaccgccgaccctctgcttgtaaggcagatgctctcccagctgagctaatcctccatacttgcaggatgtccagtttttctaactgttatcctatataatgcgggtgaagggacttgaacccccacgtcataaagacactagatcctaagtctagcgcgtctgccaattccgccacacccgcgtaaaatggtgagccatgaaggactcgaaccttcgaccctctgattaaaagtcagatgctctaccaactgagctaatggctcttctacaagagacttgaatattatatcatataaaagtggtgccggcaagaggacttgaacccccaacctactgattacaagtcagttgctctaccaattgagctacaccggcataatggtggaggatgacgggctcgaaccgccgaccctctgcttgtaaggcagatgctctcccagctgagctaatcctccataattatgttttgcgcccgtagctcaattggatagagcgtttgactacggatcaaaaggttaggggttcgactcctctcgggcgcgccatatcttttaatagaatagataggaaatcgggaagtagctcagcttggtagagcacatggtttgggaccatggggtcgcaggttcgaatcctgtcttcccgaccatttttatggggccttagctcagctgggagagcgcctgctttgcacgcaggaggtcagcggttcgatcccgctaggctccaccaaaagtttttaaaaaagttgttgactttgaagaagtgacgttgtataatgataaagttgctttaacaaagcagaatcatccgactgcttcatttgcgggttaatcgcgccgaaggtttggttgatgttttcttcctcctgcgatttcaagatggagccgcttttgtagcctgtgatttcaattttcgggccggtgtacatggtttcgagctggtctatatattttttcatcgtttgaaaatctgattttgcggtttctagtgcttgggtttgctggccgtcaaattgaaagagcttattcagggtgtctgaaatcagtcgctcagcctgttctgtttccattcggaaaaaggtatcattgactgccggcaagctgacgatgtgccatcgctgcccgggtctgggtcaagtgagaggaacacgccgtttcttggctcgtagtagcgggccatgaggtagtacaggccggtttcttcgtcgtattggtagcctgcgtagcggtagcggttgtcttttacttcatcgcttgcttcggtttttgttggatttccccatgcgtcgtactgatatttggcaaccgtttttccggtgctgtctgagatcgcgatgacgtcgccgtgtgcgttgtagtgatagaaatatttcttgccattttccactatgtgatatcttgtattactaattgaatgtgatgtctactgttatctagttttcaaagaacacgttggtggagcctagcgggatcgaaccgctgacctcctgcgtgcaaagcaggcgctctcccagctgagctaaggccccgttatataagatggtgggcctgagtggactcgaaccaccgacctcacgcttatcaggcgtgcgctctaaccagctgagctacaggcccatcttaacttattcaaggaacaaagttctgcggaagtagttcagtggtagaacaccaccttgccaaggtgggggtcgcgggttcgaatcccgtcttccgctccaactataccatccacgccggggtggtggaattggcagacacacaggacttaaaatcctgcggtaggtgactaccgtgccggttcaagtccggccctcggcattacggagcgcgtcatgatgctcgatcagcgcctgcaatgttttctccacccgttcagggtcaaagcccttcgcggcgtgaagcatcaccgattggttccagtggtgcttgttcgtgaagttcttttcaaagaaccagcgctggatcggcgtcaggatgacttcgccctctaccggggctatctgaatcgagaagacgaaaccgcgaagcggtttgtcgctgatccgtttgtgccgggtgagcgcatgtaccgcaccggcgatttggtgaaatggacgggcggcggcatcgaatacatcggccggatcgaccagcaggtcaaggtccgcggctaccggatcgagcttggtggctcgggacggaatcgaaccgccgacacacggattttcagtccgttgctctaccaactgagctaccgagcctaagtatttaaatggcggtccggacgggactcgaacccgcgacctcctgcgtgacaggcaggcattctaaccaactgaactaccggaccattttgcgatacttcctaaattgtctccagatttaacagtataagtggtcgtttttcgtgtggaaccatcactgccagaatcattgccactagcgtaaactttcaatacttggccgacttgaattttatctgggttgctaatgttattcagtgattggatctctgacaatctctctaaaggcggaaggtaaggaaactccgctaagggctctcacatcctgtgagaaacgcccagtaccttcatcctgaaggcatttgtttggtggcgatagcgaagaggtcacacccgttcccataccgaacacggaagtggtcgtttttcgtgtggaacccccactgccagaatcattgccactagcgtaaactttcaatacttgaccgacttgaattttatctgggttgctaatgttattcagtgattggatctctgacaat
